United States Patent Application Publication US 2022/0211063 A1 - sequence listing, part 18

SEQ ID NO: 55 - DNA, 8605616 bp, Penicillium roqueforti (residues 5,163,373-6,884,496 of 8,605,616)
  misc_feature (89143)..(89590): n is a, c, g, or t
  misc_feature (91422)..(91652): n is a, c, g, or t
  misc_feature (329890)..(330026): n is a, c, g, or t
  misc_feature (430777)..(431108): n is a, c, g, or t
  misc_feature (461660)..(461676): n is a, c, g, or t
  misc_feature (496393)..(496572): n is a, c, g, or t
  misc_feature (531997)..(532091): n is a, c, g, or t
  misc_feature (539747)..(539882): n is a, c, g, or t
  misc_feature (569530)..(569734): n is a, c, g, or t
  misc_feature (649047)..(649183): n is a, c, g, or t
  misc_feature (691108)..(691170): n is a, c, g, or t
  misc_feature (866493)..(866657): n is a, c, g, or t
  misc_feature (1032404)..(1091803): n is a, c, g, or t
  misc_feature (1092490)..(1092701): n is a, c, g, or t
  misc_feature (1210158)..(1210370): n is a, c, g, or t
  misc_feature (1240516)..(1246788): n is a, c, g, or t
  misc_feature (1247715)..(1253647): n is a, c, g, or t
  misc_feature (1258266)..(1372265): n is a, c, g, or t
  misc_feature (1374099)..(1374507): n is a, c, g, or t
  misc_feature (1457506)..(1457792): n is a, c, g, or t
  misc_feature (1505319)..(1505491): n is a, c, g, or t
  misc_feature (1513190)..(1513352): n is a, c, g, or t
  misc_feature (1624032)..(1624233): n is a, c, g, or t
  misc_feature (1669142)..(1669347): n is a, c, g, or t
  misc_feature (1761210)..(1761436): n is a, c, g, or t
  misc_feature (1817747)..(1926046): n is a, c, g, or t
  misc_feature (1933147)..(1933397): n is a, c, g, or t
  misc_feature (1963959)..(1964336): n is a, c, g, or t
  misc_feature (2150494)..(2150592): n is a, c, g, or t
  misc_feature (2196724)..(2196932): n is a, c, g, or t
  misc_feature (2250718)..(2250774): n is a, c, g, or t
  misc_feature (2391514)..(2391805): n is a, c, g, or t
  misc_feature (2493520)..(2493751): n is a, c, g, or t
  misc_feature (2532126)..(2532403): n is a, c, g, or t
  misc_feature (2536272)..(2536513): n is a, c, g, or t
  misc_feature (2786514)..(2786770): n is a, c, g, or t
  misc_feature (2859475)..(2859766): n is a, c, g, or t
  misc_feature (2873886)..(2874990): n is a, c, g, or t
  misc_feature (2881507)..(2881812): n is a, c, g, or t
  misc_feature (2897061)..(2897239): n is a, c, g, or t
  misc_feature (3050629)..(3051353): n is a, c, g, or t
  misc_feature (3057144)..(3057395): n is a, c, g, or t
  misc_feature (3069494)..(3069869): n is a, c, g, or t
  misc_feature (3075725)..(3076099): n is a, c, g, or t
  misc_feature (3305006)..(3305103): n is a, c, g, or t
  misc_feature (3318292)..(3318616): n is a, c, g, or t
  misc_feature (3502594)..(3502708): n is a, c, g, or t
  misc_feature (3537879)..(3538462): n is a, c, g, or t
  misc_feature (3783308)..(3783522): n is a, c, g, or t
  misc_feature (3992172)..(3992290): n is a, c, g, or t
  misc_feature (4005072)..(4005335): n is a, c, g, or t
  misc_feature (4027270)..(4027470): n is a, c, g, or t
  misc_feature (4058374)..(4058520): n is a, c, g, or t
  misc_feature (4267290)..(4267327): n is a, c, g, or t
  misc_feature (4352793)..(4353255): n is a, c, g, or t
  misc_feature (4361792)..(4361944): n is a, c, g, or t
  misc_feature (4393710)..(4393943): n is a, c, g, or t
  misc_feature (4451442)..(4451579): n is a, c, g, or t
  misc_feature (4461471)..(4461717): n is a, c, g, or t
  misc_feature (4481177)..(4481295): n is a, c, g, or t
  misc_feature (4533818)..(4533955): n is a, c, g, or t
  misc_feature (4590078)..(4590306): n is a, c, g, or t
  misc_feature (4668900)..(4669232): n is a, c, g, or t
  misc_feature (4737074)..(4737168): n is a, c, g, or t
  misc_feature (4766696)..(4766893): n is a, c, g, or t
  misc_feature (4834476)..(4834783): n is a, c, g, or t
  misc_feature (4927466)..(4928039): n is a, c, g, or t
  misc_feature (4945079)..(4945229): n is a, c, g, or t
  misc_feature (5082499)..(5082647): n is a, c, g, or t
  misc_feature (5112540)..(5113261): n is a, c, g, or t
  misc_feature (5314617)..(5314810): n is a, c, g, or t
  misc_feature (5372550)..(5372977): n is a, c, g, or t
  misc_feature (5458853)..(5458964): n is a, c, g, or t
  misc_feature (5480164)..(5480337): n is a, c, g, or t
  misc_feature (5535306)..(5535320): n is a, c, g, or t
  misc_feature (5567454)..(5567593): n is a, c, g, or t
  misc_feature (5598682)..(5598895): n is a, c, g, or t
  misc_feature (5726706)..(5726784): n is a, c, g, or t
  misc_feature (5743217)..(5743685): n is a, c, g, or t
  misc_feature (5807375)..(5807461): n is a, c, g, or t
  misc_feature (5919721)..(5920399): n is a, c, g, or t
  misc_feature (5921713)..(5922019): n is a, c, g, or t
  misc_feature (5942595)..(5942874): n is a, c, g, or t
  misc_feature (6011060)..(6011355): n is a, c, g, or t
  misc_feature (6324898)..(6325216): n is a, c, g, or t
  misc_feature (6397315)..(6397426): n is a, c, g, or t
  misc_feature (6604582)..(6604752): n is a, c, g, or t
  misc_feature (6843517)..(6849268): n is a, c, g, or t
  misc_feature (6859623)..(6860263): n is a, c, g, or t
  misc_feature (6914980)..(6915767): n is a, c, g, or t
  misc_feature (6919071)..(6923941): n is a, c, g, or t
  misc_feature (6950390)..(6950526): n is a, c, g, or t
  misc_feature (7009957)..(7010194): n is a, c, g, or t
  misc_feature (7088551)..(7088774): n is a, c, g, or t
  misc_feature (7280841)..(7281020): n is a, c, g, or t
  misc_feature (7435200)..(7435325): n is a, c, g, or t
  misc_feature (7579890)..(7580210): n is a, c, g, or t
  misc_feature (7597887)..(7598036): n is a, c, g, or t
  misc_feature (7639101)..(7639217): n is a, c, g, or t
  misc_feature (7648311)..(7648518): n is a, c, g, or t
  misc_feature (8007231)..(8007417): n is a, c, g, or t
  misc_feature (8052974)..(8053439): n is a, c, g, or t
  misc_feature (8129120)..(8129535): n is a, c, g, or t
  misc_feature (8133830)..(8134018): n is a, c, g, or t
  misc_feature (8188105)..(8188254): n is a, c, g, or t
  misc_feature (8239788)..(8240259): n is a, c, g, or t
  misc_feature (8245696)..(8245807): n is a, c, g, or t
  misc_feature (8304973)..(8305563): n is a, c, g, or t
  misc_feature (8313929)..(8318046): n is a, c, g, or t
  misc_feature (8345244)..(8345345): n is a, c, g, or t
  misc_feature (8407624)..(8407830): n is a, c, g, or t
  misc_feature (8424515)..(8424640): n is a, c, g, or t
  misc_feature (8481408)..(8481631): n is a, c, g, or t
  misc_feature (8596929)..(8597175): n is a, c, g, or t
tagaatacagcaagtaaactcccgttcctcagattcggggttcatgtatgtgaaatgtccaagagactcggtagtcgagcatgacaacaaagcaatgcatgcaacaaaagagataaatgcaatatatgattgagggagaggtgatgagaaactccatggcctagaaactgaacaatccgcttcgcttcttgcctagcggataaaccaccaaagcggctaggaagagaccaactgtcgttccaatagcaacttgaaccatgccatatccgatatcgaaaacaaccccgtagctttggcttctcgcctcgtcggctgatagcttctttgccgcgtcgacaaatccttgtgtcccattgttcacaaccgcatatggagaccgggtcatttcctcagcagaagtaataccagatatcagagacccactagcggcaagaccggagggaacgaggacaaagattgccggcagcattgccgcagcggcgagcccatgctgtaagcggctgtagaaattgcccatcacaccaatgacaaaggcgcccagggcattggacacctgggtgttggaatagaagcgcttggcgctgaagtagttggtcacgtagccagccagggagatcactatcataatcggcatttgcttccacttggcgcggttgacgatcgccaggcacacagtgaataggatgacgaacggaaaccgttgcaggtactcgttgtggatggggctggcgggacatgtatacgccgttgaagcttgagagtcgaggagcccgtaaacggcagtgccgatggtaattccaaatccgaggaacagcgagtatatgatagcatagaccatgcgaacagaacctgcaacgatactgcgtgactggagctccagactagcacataatacagtgtatcctggcaggatgagggcgatggccgactgtgcgagggcagaaaagcagaacagaggttccccattgaacctgatgcttccaaaggcacgggcaaggaaagacgtcaggactgcggcggagatctcaaacacgttcgaatataggctcgatttggttgacaggatcaattgtaacacgccgaggagacatcccagtagaaacgccacggggatatccaccggtcgggcgttgaaggcaaagggcccgactgatgcgctagcacagccgtgggcgaagatgaggaacataatgtggaatttgctctgcttcttcatgacctcatcgagccgctgtattgcctcttcaaccccaataacatcgtgaatcacttccttataaatctcatgcacatcagccagcttacccaggtcaatgccttgactggatcggacgactttgacctctgttgtgtgtgtggaggcgtcgtcaaaggagatgatcatgcagccgggtatgtacaaaaactggccatctatttggatgacgcgagctgtcatgcgcatatattcctccaatcgatgagttggagctccatacttcatcaaagcgcgacaaagctggatcaagtaccgttgtcgagacagaagctcggcaatatgaacagtgatatgaatttcatcctcaagctgagccttgggacgtgagcggcttaggtttggaacggccgcaccactgctgcgggaccgcgtgagcatggcaaagggggagccagagcggcgggaggagccggccatggaaatgctagaacgagcggttgatttatcgtaccacttcctttgcggtttccaaacggagtctggagacaggccacgtccactgaactcggaagagctcccctgtcgagaccgcccataccgtcctcgaccttggttgtggttataacgaggcttctcgtagagcttgagcagcgatgagagaattcctccgtgataacttgtcgtccgttcagcagactcgtatgagttcctgtcctcgctgacggtgtcttggtcactggagtgcaacccgggagactgagggcgaaggcgagtcagaaagttcaggtctcgaggtgacatttgatgcactagataatgtgctccggagttgcacggtgttgatcgcccgtctaagaattccgcttcatgttcatctattaggttgtcgaagagttgttgtttctcggggaagcttatcacaggaaatttatcttcatctgcagtctggcacaccacttcggtgggggtggatccaatctcagacactagactgcactgggggctttgcttcggacaattatgcgggcaattgagaagggatgtgagcctgtgggccctttcatgtgcaaagcagatggcccgccccttgtcgttcgtaccctgaccaagctcatactctgctgaagttcctggtgagctagtcctggtgctgatcgtcaaaccggtaacacccgctgacgcgctaaaatgatcgtcttccacctgtggtgccagtggggagcttgaggatactttctcctgaaagcccggaatgttggcagtgggtaatggtctttgcggcagctcggtgcccctttgatccagtcggaattcgaccataggcccagtgggttgttctctcaaatcggattcgctgtccgtaagcttgacgcgatttgtgtttttcagaatgccggcattccgatacttgtcctgtgcgctagcgtcactgaagctccgcacctgagacactggctggccttggaagctatcaatgagcagtgatgatgtaaaggaacgcgaccttgatagactggacgatccttcctcagaggcgctgcgggagatcggaaggtcaaaataacctcccgccattatggtgtaatccttcctcttagattggcatctacttcttggttactcagtagagctcacagaccccctgggttaccgacctcttagataaaagcacgggtatggcggttcatgtgcccaggtgatcaactgtaacccagcaacagtcagctatgtgatataacatggggagagctcttctttccgggaatttgtgagcttcgacaaccacggagagtgagctcacctcattcaaggcaaaagcataaaaaaaaagaggaagagatactgatgccaacgcgaaaaagaactggcacgaactaccacgccgggtctagagctccttgggaaggggggttgagatcggagatcctaccaggaattccaactatgtcatgtgtacataattagacgtagaatattgtgtcggaaaataaggacatctgcaacctcggaggaaggggcaggaggaaagaaatcaggcaaggcaaaatcaatataaaagagacagtagacgcgaagtttgggatgcaggagttcctctatttacgaggatgctctcggttaaaggcaagactaaaacaaaaagagaaaaaagacttttccagcttgctgggcagcacacgggccatatcaagaagatccagaggcccaatgagactgcattgaaggggatttattttgggacatgatgaccccgtgtagccgtgaggcgccatccccatgccaggttctcacaggttttgccattttgccacgatggtcaatcagctggaaagttccaggagtagagaacaagccgaggtatggaactgacagctagaattgtgaatagaaacggtacattgccccttagcgggtattgcgggagattggcacattagttgcgcgagacccggttctctgacctgaaaaggattggatttgcagcacagccgacgttccggatcgtatatcgttgaacctcgccgaacctcgaccgttagacctagcagaagatctcccaaaggggatagagataaggggaccgagctccttgtcaaagagactaggggtttcacaagtccatgaggtcccacaaaatctgtagagtcaaaagagaatctgatggacgcgtcaggtcaaaggggtgtgtgtgtgggtatcgagagattggctgaagagggatcttcaggatcagaggttgaagaagatcagtggagcaactctcttttttttagcgttgatctaccttttcatgttgactaagaagcaatatctggtcttatctccccttctatttctacttgcgtccacattgacgtatgaaatgcgattacgaaccagtccaaaccatcccttgtgtgtctttgacatcatgggaaatcatccgacaggcgaaacatctctgtcatgcaagatacctgcaagatacctgctttcactagtttctgattgattcgaccagtcgagaactacatacgtaggattccaacactattttattatccacctacatactataattccacatcaatatgggtctgaagatccctatcacaccatcgggaagaatctcatcggtattgatggccatctctctactttccgaccgagatcttaccgagaagcaaatgagtactcataccgcaggttgacacccggaagacctccgggacccgactcggtgttgattctcagaggggatgttgaaggtttttgatctgtcccggcaatgtacagggtaccacgatgaaaggttgcactaatatccggggaaactgtttactctctctgcttgttccagtgctgtaaccaattctactgcccataggaaagcccgacaagcacacatgcactcctcagcgggctcgaaacgcccccttcatgttcaaccaatatcccacagatgagctcctcgctcgtcattgtgccacttcaagatgtgagatgcttatctaggcaatgatcattacccaacctatgctgcctaaaaccctacttcaagggagctggggtgatttaagcttacaggtgtggctgctgactagttctggatattgtactagtcatggttatcagtcagggggggacagccagggcccaaattatttctcgagtggcaacgaacggtacattcaattgggtactgtgcaaggtgactcttgaatctctgagatggtatcagatagggccaggattgtctctttcgaggcgctcgttatcaaacgttagtattgaacattctgatggagttttcgtgcgctattacattgggccattcgtggcttggggaggggctttctcccatttgtttctcttcttggactagatcaatatcttacgctatcacaactgtagaggcttgattgaatatgtcttgcttcacctctatctcattattttatgcaacaatgcgaccgcacaaccatccgtgtcaccctcaccctccctgtccgtcacactgtcttcttccccaccagctgtaccgaagaatataatggtgtgaccttcaagaaagtagggaccaatactcaagcttggacggcagtactatactgtttatgtgaaacacatgtgccacggagttccggctgctctaccctcgggtagacacagataaagctgctttaatcccaggattcttacgtggcctgggagtaagtaaatatatcgtcttctacaattatgcattgtggcattacactttagagaacgaagatcccgttcacattcctaaagttaagctctcgactactatatataggttttgtcaatggtaaatgtcttgcattgcgtatgtttcaacttcctttctttcatgatggttccaggattgttgccattgtttagttgacttgtagacacgtagaaataatgtcaacttagagtttgtgtcaaggttttttgggccgtattcgtaccatggttcttgatataacgaccgcataactatttaggtgaatgcatagtgattcgtatgttccaatctcaactcttagaatatcaaggtttggacgccggcatgacaaccagccaagtatatcaaactaggtgccatctgcacccacgcggaatacggtttattgggcttcactctgcagcccaacggattatttccctattcaccgtgcagacggaaattaagctacgtatatgatgagaagccaagagccactaaacacttaataacatttatcacatcgtttactgtcactgaagtcctcatttgggccaactcatcactttcctcactgacagcggccgttcgagatctgagttcatctcagtggatgtataacaatcagttctcatttcgccttttgacaaaagcgtaagctggaaccgaaatagttatgcagctaccccaagctcgggaccaccctccataagcatcagcatacaacccggctctgtaaccatgacactcagcgtgaggtacattacatggtgcatcaagacgacagacctttcaatgtggtctagtgagattgatactgccccaagccatggtgacctctagtagccattctttagagtatcttgtaaccctttgaccctaccctggcttatgcctttcttactttcaaacatcaagcttaatgatagaaaacgtctttcctacagcaatacctacccaggactcttcaacagaccgagtaaccaagtgctccacgtgggtcattgcaggacaacaccaggattatcataggatctaagaaaaatatttgcgtattccgaataagccgttgaattgttcaaccaaaaaaactacttagatactagatacgttcatggagcatgatcaacatagccaaaacaaaaaataagatcagatatttgctaagatatgtattcaccagggtgatctgagctcaaagtgcactgggaagagctgtctgtacataaccagatgtacatcagaagccaaattgagaagtgaagggaagacaacttgccatcgcaagttcctcttcctgtctcaagctcatcctgtcatttccaagtaaatagatccggtccgcccagcctcagttatgatgcaaggtgacaaagataaagcatagtggagaaatatgaagagaagccaaaagaaaaaaaataggaataaagtcatctcagaccgataaaggtctttcgtcacaaaaaaacatgaaccctggcatgagttgccagcaatagagtggtaacgagaaaaagaatgggggagggtcagccgctgtcgagtccttttaatcaggactcgctgggcaaagaaagacgaaagctgacccgtttggcgagagaaaaacataaaggaaggtcatacgtcgctgtcacgtgtggttcggcattacatgatgggtgtcttgcgtttttcagcgctggacaacaccagcatcggcgtcttgcgccgttctggtgcctgggctaccggcccctggccagcaacgacatctgccactgagggcgacgaggtaccactggcactaggtgagtgggcataatccccgcgagcatcaacaagctttgagtaaaagtagcctccgtcttcgctagtcggcgtggcgctgtggaaggggctgtccggggatttgcgatcccgaccagatttttcccttctctcggatccaatggcaccattagcaactgctcgcaggctgcctagactgggcttgctggagagacttcctccgctacgcacggtggcatcatcgccatccgaaaaagtaaactctttctcactcgcaggggtgttcgtgcctccgctgctgtggtatccaaaactgcgtgtgtcgccacgacgctcgattcctgcgcgaacaagattgtgaacggcacgacgccgctggcgagtcgcgaagttcttgctaccttcgtgcttggaggtgggcttggccacgagatcctcaagcgaaggggggccacggggctgacgcatcggatgctcaccagcacgactttgaccgggtccaaatgttccagtggccggtgtcggcggcagggcagcagacctagggccgggtcccacattggccttgacagtatcaatgttcgtcttgatacttgggttgaacgaaaggttcttgcggtggcctcggcgcagagcattcacagacgagtcgtggggcggagaggggctgctaactggaggggaaattggctgcgggaattgcatggtagagtacgtggagtccgcaggaggagaaatttctgcgcggaactggggaacttgctggccaatatgggaccgagtatcttgataaaactgttgctggcgatcttcctgggagttatccatgatatagctttgttggccagtcagaggattgtagacgcagaacattccaggttgaccagggaccggctgcacaatgggctgaacaccttgctggagctgctgttgataaaatcccatgccagggatggagagtgaaggagcatgttgctgccgaggaagggacatcccaaggttgaggccttggaattgctgagctgcagcagtgacactgatcaactgctgttgcaggcgttgctgctgcgccgcaaggaacaggttggttgacatcaactctgcgtacatgttctcatcgattggaatatcaccacccgccatttcaagcgtcggaggtgcaagaacctgctccggcatagtgtacatcatgcggttgtgatgcgagttgttgcggtacgagttcgcgttttgattttgggtgtaattgtgctgtgggaatccagttccggtcgcagtttgtgggacccggtcggatcctcggttggaataaccagtgaatcgtgcaccttccattccactccgctgttgatgctcagaggggatcgtcgcagacttgggagcagtgcgcagtccagccaaaagatgagagcggctggtacgcggagtggagacggatgctgatgcctgggactcatcgatggtcgaaacctggggaggcatgctcaagcgcttgatgtgagagcccttgccgcgcgaggcgaagccagagcccggcacgcccagggaattgccattattgaaggacgaattgtaagacatttgagcaagaccgccagcgtccatactcatattcgttcggtagaggtgaatttaggtatgtgcaatagaatgcaagcgagacaagcggtatcttttgacgttcggattcgacgtgagcgtttggggtcaaccacaaagctgagctcacttctcggcgattaaggaattatggtgtctatgcgagaacaagtgctgaaataagtctgcaatatcgagattcaacgaccggaaaatgaaacgtggacgcgagagtcgggttttctgtatccggaaactggtcagtgagatccaacggatggggcacaaggcaatcacacgtaccaatcacaggtgaagaaaataaagcgagcgagtggctagcgataaagacgatagatgagagaagaaccgagctgtacaaggacttgctgggtttgaaagttgcgaacccaaggaataggtctcgaggaagccgaggagtttgagatatgttgacagacacctcgaaagaaaaaagaagaaaaaattaagagggtatttttaggaagagaagccacgcacgaagctagaccacgaagaaaagataaaatgtccgggggaaatgctctgcaaatcctagccgaataagaaaagagagtagttcacgcgatgccgaagatcgaagacttgtaggctgaaacactcaaggtggcgaccaaacaacccagtgctgtgcgaataaccgaggtgaaaacaggttcaaggatccgaagagatggatttgtgaagacaatcaaaaatgtagtgaattcggtccttggccaaacacaacgtttttcctcaggggggcggaactgatcgggactatttgcaaagtggatagatgctttttttgggtgttttccatgaaatgagaagagctgcagagaaagaaggaatgcagaggggaagggaaaggaaaagaaagaatcgaagattagatggagggttggatgtaagagaagaagaagaagtgagcgattaaagatggtggatggccgcggggattgtcgcctaatccctcaggcagcaaccgagcacaatagtccaaaagcgtactagcgtcttttctcaggcacgagaggcaatatcaacggaatatcaacggaggttcactttgatatcttcttttcatcatgtttggaaacattggggtaattcaagctttttcagctttacccttactctaggcaatatcctattctctaccgaatgcctgatcatagctgacagcattatcatagaagacccattgaggagatctgactggctcattctattgaccaataagcaacacacccaggcctgaagcgatcccatcacatccccagccaaatcattggctgttatccactagcggcgcgacgtggctgccatccaatctacgcctgacgatgcccctggagccgctcgtcgcaaatgccaagctgtcggcgccaaccaatgggtttacctgaacttgtttgcttctagctcataattcagtcggatctcgttatggtcaggaaatcaggagtgtagtattttgccacgaactgcaagtgatcttaggcggctttgatttctagaaggcaacaaaaaccaggaaaaaccaagaaaggtatcgggcttgcagaacattgtctgctatttcgatacagggtagaatctaagtagactacaattctcatcacattcatggttggatgctttctcatgatacattgcacataatcaccaaatgatgcgatgtatattattgtagaaaagatcacattctcctgaatcatgaaaccagcaggacttgtcgcttgttgctaccccaacgacaagccgacgtcttcttcagcaggaagttccggaaattaaaaattggcttcatggctgcccagacgggcgtgcaagtccagcaacaaataatatggacgtgcaccatttattttggggccatatatagaacaaggtaataagagactgcatagactagggaactgttaagtgagatcgtgacataggagttagcgtgattatcatctacaacggccatgaagatacggattgtcaattggataattcatgtaaacgcaggtgtaaaccacgcattttgtcgccctaaatgaaccatacatggataagatacgtctcagcccctcctggcttcgtatttcgcatctcgcccgttccggagccgctgtctcccacgttgtatgtacaatgtacaagcactttgatggtctgtacagacacacgaaaagagttagactgcctgtgcgtgcattgtcagaatgccagtcaaatggcgaatggacccagaaccacaactagatgagttgttaatgagccatgagaacatgaagaaaagataaaccaatggatacgaagaagaaagagaagatgcggggtatctgctggctgggtagtgtgccagagggagaaaatcaatgagtcatgaaatataatcaaacataaaagttcacgcgtgcaacctcgcggtagttaagcatccaccgagacaccgggtccatggtgagtggccgactcattctgggatggtaatcgtcgatgacctagctccggagtagtgcccttgccgttcattcggtcaaattccaacgtctcggccaactccgcagccatagggtctagatcttcttctttaagtccggtcgccaaagccaccagcttacggtgcatatcgaacttggtgctcacacccgcatccgctgtttgttgggctagatccttaatagcattgcggcgtatcttctgcgcagagcaaagctcttgagcgagtcgataccgagccattaattcaccttgctcaagggactctgacgtaggtttaggtacctccgcaatagcaaactgttcagccaaccgagcatgctggatttgctcaagaagggactcatagcttgcccgcaatttttcatatcggccagcttggtcgtcattgcgctcatgatcggcctccttggctgccaatgcagatatttgcttctgaatcttctggcggtcggattccaattgctcgtgtaacgcttcgggattggcgacatcattggaatcctgctggttgattttcgagtttccataggtcacggcaagctttttattagcctcggccatgattgttccaatcctggagaggagttcagtggtcgcaggggcatccggaattggggcaacggactgtcggtctgtgcccacaagaccagctggttcaacatccatatgttcattagccatggtgacggaggatggggccggcgggatgtcatggtcgtgatgttgagaacgctgtacgatactgctagcggtttcccccttattattcaccagatcgccagcgcgatgacaatgcacaagaaggatattcaccagacggaacgcgccgttgcgagcagcgaccaagacagcggtgtctccattctgatcttgacatgacaacaacatttgtacttcatcttgcgagcatgttttgcataacttatcgaggagtatttcgcagtaataacgtgagctcttccatttccccttgcttcgagtattctctgcaatgtgatggaagatagtggcaccgaaccaatctcggaaagagacagtatccagaagcatgtctaagagattcgaaaacgttctcttttcgtaattattggtaaacagaacagctcggacgagtggggtctcttcatgatccgaaagtgccttgacattggcccctctgtgcaaaagatcttgcacaatgcccaagtcacccatcgcacatgcccagtggagtgctgtgttcccagaatcatcaatagctcgatcgacctggaaatgggcagggggttcgggagggggaatgcgtgttgcctctggtgcatcacccacggtcatgaaatagtctaaaagttggtcgccgtagattatgtgttcttgctcgctgatggacataggggtcgcctcctccactccacgcttccgcttccgtccgccatgtgacatttgaagcatatcctcgtctgcgaccattgatgatgattcaattgtagcgtgcccgattgactcgttgtcgtcaaacgctgcattcatttcatagtgatcctgtggaattgttgggggacccatgctgcgctgaggctgaacaactttcaggctttcggaagctgctaccgcagccgcggccgcggccgcagcggcagcacggtttgcggcggccgatttccttggtgccctaggtttggatggagccgatgtgtgctttggcgctggtgggggactgtggtctccagcaacataatcgaaaatcggagctagttttgtgaggatgttgttgcgttccgcaagctggcggccttccggaagtgggatccatgttcctgtgagcattagctgtcagcaagctaaattttctacgggcttcatagatcctaggacataccttgatatttgccatagcctccctgaactttctcatgtacccccttctggacctctcgttcaagaatgcgcgttcgtgcaggcttatcaaaccctgcggctttgaggatgtgtgttgcattgacccaatcatcccctctccttctcatcacactttcagtgtcgagcttgaactcatacacggggacctgggagagagaacgtcagctgtgcgcgcattcaacacggacaacaattccaggccagcgcagtgaaaatatctaatcaaggtatacttacactgctataggtagcagagtagatggtgtctctccccgccataatgtgcgtcgcgcgttggccgctacaattcagtaggttcccgaagagcgatgtaaccgcgcgcgttggagccaaagcgtgacccctagaagacccacaagttgatcggcttaagaattcttcagaactagatgcattgcatgcaatgaaaatccggaccaagaacacagagatacgattcggtggagctggggacatcagatacgcgctggacgcgtaaagtgcgcactagtcctgtttcggaagactatctgtcatgtgattttgtgtcatgtgaccaatatcggcccagcaggaacctcagacgaacgggaatcgccaaccacgccgttttgcctctgtttccccgctccttgcctctccaccccttaattctcgacaaaatgactgtcattgaaacggttaagagcgccgttggcctttcggagacatccggtatgattcttaggccattgattaacaatcataagctctagcaggaaggttaaccaaattccagcaacccgccaggaaatgtcggaagcccgtcttcccatgcagtacagagattcatgcgcacacctgctgatcccgttgaaccgatgccggcaagcagagtactaccttccctggaagtgcgaggtacgagatccctcgttttgatgttcctacacaacgccattcgaccggagcgcttccagagctagtcagctaatgttttcttttcttttgtatcaggatgaacgacactcatatgagaaatgccagtacgaagagttcaagaagcgcgtggccaagatggacgagctgcgtgccgccaaggactacacccggcgcaactgaattgtgggactgttggtatgcgcagtcggtgctgctgttaaagcagcaggatatgtaaataatagatacaccgaaactgcttatggattgccttttggcgttgggacctttcatcaaaatcggccactttttcttcgcccatctgaacaacaatcgcatcggcaacttgatgctctgtttagtattggctaggctggtacccatgcttctcgggctggcctttttcttgggccaagcaatgtctatggacaactcgtcctttggcatagctcgagcgcatgtaagcagatggcatggtgggttataactctagtggactctaggggctttgaataatcaattcattggagttcctctgtgatcaagacgctaggatttatagttcttttggtgaacttaggccgcactgctttgctctaggcaattatgccttccaatgctgttacgacctaccgatgtgaagcctgtaagctcatttgagatatttacctatgtattttatagatctcgccctatattaaacatcttgagctatcttgagctatgatcatcgcatgttgtctaattaaccccatttagtcctgcgtccaatgaccgtttgcggctttataagcttaagccgcaagttctattggctgtattgcggccgattggttgcacgatattatactaattgtaggaggtatggatggtgataattgaaacagctggacaaattgaataagaccgaaaaatacagtctttcctatatagctcttgatgaagagctacccagatgatttctctcatatggatgtctcatataacatcgcattataacgcgatacctgcttatttgacacttgctttcatgcagattcacgcagtagtcattgaatcatatcaatcaatcccttatacttgtgccatgttctatgtgatatttggcatagacttctacctatcctataggtaatagcatccccacagtttagctgaatgtgggtatcgaacatcattcaagtttatcttggtattaactactgactatcatatctggatccattttcattccctttgtatatatacaacgctcaggcctataatagacgcctttatggtgatcctcgaagacgcaagtgcagggtcttatctcaccacttctatctcaccacctcaaagctctctataccaggacactccatgttcaatatctcccaaattgaatcaggtgaggaccttgataggattaccttggaagtctctagagcttcaccgtgacaaatcatgattaataatacaagtcgaagatttggcaggtggaaataaaactcccgccgttatcgccgcccccgctagaaaatcggccgaaaacttgaccccctcattgcgacttgccaggaattacagcgaatcaattagaaaggggactatgcgcaggtccatgtctctttgattactctcggtccttcaatcttcggctttcctgttcactctaggattgtcttgattcgtttatcctatacttgtgtctgggcattttgtgttgtcagcttgagagcaacgtctcgacacaatgggacttctgtatgtgtcttgagatgcttgatttgctatttgggatccctctaatataaagcagggcacttggaacagcgctggaatggccggaagccaagaaaaaggcgggccaagtacgccagtggggtatcgaggtatgccgcgtctaggtcgcaatgaaacaatttcaaggtgtctgacttgattagcaattacttgccaattggcgcagggcacgaggcaaagaacgcgatgctcttctttggggcgacgaggtatgttgttctggcccgcgtatttcccggtcgcaatcgctaatcaatgccctctatgatagattgaatacctcgtggtagctctggacgacgcggcgaagaaggcacggctatctctagcccaggctgagatcctgatatcacttgcaagagacgaggagttgtggaagtctggctccggcaagcgcagtgcaactggagaccagtgagtgtgattgatgtccaacaggaactagcatgtctgacatcaaccagtgaaggagaggagccgcctcatttccaccccgaatttggaaggttcatgttggaggctactcctggacagccttggggaatcgggttcaaagacctcctcaaggtggagtccaatatgaagtggaggtgagctctttagcaatacaacttgactcgaaacatgctaatagaccccaagacgagaagttgcgaaagcacagatggctccgaatgaagtccccatcaccctcacaactttccctcggctaggaaccagtgatgactacatccagccatattatcccccatctgggccagctcttcgctcgcagtttgttcctgatgagattgccaatccgcatattcgattccctactctggctgccaacattcgatcccgaagaggtcgcaaggttgaactgaatgtacctgttttccatgacacaaatacgcccaggccattcaaggatccaacagttaactacgaccttcataattggcccgaggatgatgacgtccgcaacggcgcagccaaagatgaccatgtctacatggacgccatggcatttggaatgggcagctgttgcttgcagatcaccttccaggcaaagaatatgacagagggcagaagactttatgatcaactgagtcctttggggcctattcttctagccctgaccgccgctacacccatctataagggtttcctagtggacacagatgtacgatggaaccaaattggcaatgcagtcgatgataggacgcccgaagaacttggcgaagctgtaagttttccagaatgatacccttagcccagaactgacctctcgcagcctctcaagaacgaccgatggagaattcccaagtcgcgatatgcctctaattcgacttacatatcccaggatcctcgtcttcggaaagaatatttcgatcctgatctagttgttgatgaggatattaagaagcgccttatggacgggggaatggatgagctactcgcgacgcattttgcacacttgtttattcgtgatcccttggtcattttctctgaggatcttgaagaactagatcttaacaagagtgaccactttgagaatttacagtctactaattggcagcacatgcgtttcaagccgccgccacctgataaggatgatatcggctggagagtcgagttccggtccatggagatccaaatcacagatttcgaaaacgccgcatttagcattttcatcgtgctcatcactcgtgccatcctgagcttcgatctcaacttctacatcccgatccagcgtactacagagaatatggagacggcgcacgctcgcaatgctgttcttgatcggaagttctggttccgcaaggatcccttccctcgcagggtgcccagaagcgcacagcactcggcgaacggcagcaccttctcatctacgacatcgtcggctattaacactccgcctccatcgcctcctcttggccctgttgagacagaatttgatctcatgaccatcgatgacatcgtaaatggatgcacagatggatcattcccgggcctcatcccgcttgtggagtcctacctcaacagcgtgaatgttgacgtcgagacaagatgtttcctggccagctatctggatttgatccggaagcgggcgaatggcactctttggactggggctcgttggatgcgtgagtttgtagctaagcatcctagctacaagcatgacagtgttgtgtccgaggagatcacctacgatctagtgaaagcggttgaggagatgactgccaaagagggaaaaaacggatcagtcggatgggaacttcttcgaggcaaaaaggtctagactagagcatctacatacccccacaaatagatatccagagtgtgagcatgtatggcggaaacttgaacaatttgcatatattcatgacaatcggggacagcctccttgtcacagcgtctgatgaatcttaatttctcatttctcagtgtctccaatagtactcattccagcagcatttcctcctcagtcggcaaccgacacgagtccgccagcccagtcaccttccattcgccgttgagcttatgcaaaacaaaaagctccaccccaacatgatccaccacgccgttgatcttcgcccggaatggcgcccacacagcggccaggttcaggctgcctgtctcgtgcactttcacctcaggatcccagatacgttcatcgatatcgtctttgagcccagcgacatgttcaacgaacgaaccaatcgtacaaaaacgcagggaagtcggagacggaggcgagagtgtcatccctcctgctcggacacagtgtttctcgaaatcagtgcgcgacttgctgctcagtgctgcgaggaagccttgcgtgactgcgataatggcggctgtttcttcggattgtagttggattgctgccccggtgcgagagcggttcggtaatgaccagcacattgatggcatgatttagatgggagaaagcatcaacattgttatattttcgatcttcggtttccaggagcaaacatgtcgatatacgtgtacctacatatgcataccactattatttaggccacagctgttaccgttacagtgcctgtcggcctgttgtttcggtatgttacactttgtccaactttgttcaatttcagggatttcaggaaccctgcgatcttgctgtcgtacgaggataagtgcttcgtgtcacacatcgactttggtgcttggtccgggtttcgttttacaatgttgacgtccgcttttggttgaatttggtgttcgtgttactatcagaggtctgtggtaactctagctatgggtcaatttatctccttttcctatgcaaatccccgggccgagtgcaaatgtatccttgagatctttattcacttacctcggccagcgcaaaagcttcggttaatcttcggactgatcaacatggcctacgactaaagcaggcaatcgtccgtcaaacttttgagaaaatggccatgaagccaaatacgccagaacatcctgaaggtgtattggtggatgaatagccatcccacctctccgcttcctgccataatgcagatcctactccaacggctcatcattccaacctgctacgtatcttgtccgctacgatcagagcaaatatcagccgtccacatctcccggctgttgatcatagacgattcaggtgattgtggggcttccccgcatcaccaacgtcctgagaccttccagtaacgatcctatgtataccccggagtatataaatgaaacatgaaatgccacacattgggagggctagagcgggcaagggcgtgtccatttataccatcatgattggatttgcagccggctttctactatggacagtagtccatgctgtccctaaaaaatcatctcccacagcggcagtgcgcaatggaacgtatgctggagtgcggagctcaacctacaatcaggacttcttcctgggtataccgtatgcccagcagccggtggggaatttgcgctttacggtgccgcagtcgttaaatgctagctgggatggtacacgcgatgcgacacagtattcggatatttgtgttggatatggcgtgagtatgattctttcggttgctttccaaagttgattcttaccaataagaaatagacggactcgatttggtactctcagtcagaagcatgtcttactctgaacgtaatccggagttcatctgtcaacacagagtcgaaactccctgttggggtgtggattcatggcggtggattttatgaaggctctggtgctgatgagcgttataatatgtctgcaattgtggagaagtcgtatcaaattggtatctccctctctcttggatacttgaagcctggtctaacgacgattcaggcaaaccgttcatcgccgtcacgctgaactatagactgtccgcatggggctttataagctccagtcaagtttccggcagcggaaacaccaatctcggattgcgagatcagaggctggcgcttcaatggatccaggaaaacatcggcgcctttggcggcgaccccacgaaagtcaccatatggggcgagtcggcaggtgccatgtcagtgggataccatcttacagcatacaacggacgagatgacaagctgttccgggctggtatcatgcagtctggggggtcgatatccgcgaatccgggaaattacacgacgttccaatcgaactacaacacattggcctccaacgtgggctgcctagacgtcgtggattcactgcagtgtcttcgtgaagtaccattcgagacactcaacgctgttctcaacggcacggggggcaactctgactacaatttctggcccgttgtggacggggacttgattcagacatggggtagcattcaactaaacaagcatgcattcgtgaaagtccctatcattgccggcaccaatacggacgaaggaacagcattcggacctacggggatcaacaccacagagcaatggtatcaatacttgacaggtacctaaccaaatcttctacactgccacagcggctaaccctccagacgggggattggacttccaaacacccccctccgtagccaagcgcatcctcgacctctaccccgacgacccctcgcaaggcattcccgcatacctaggcgaccagcgcgtgccctccaaagggtacgaatggcgacgcacctcggccttcgccggcgactggttcatgcacgccaaccgtcgacgacaatgcgaagcatgggcggagacatcaacgcccgcatactgctaccgctttaacgtgcactcggcagacacgccactcctttccggcgtgacccatttcgaggaggtagcgtttgtgttccacaacattgccggactggggtatcactacggcaaaccgtttgccggggtgccgcagtcgtacatcgacctcagctctgcgatggcgggcatgtgggcgtctttcatccacgacctcgatccaaacccgaaccagggcgttgtgaaacccgctgtgtactgggattcttattctagggacggacctgttgatctctgtctcgatgctaatacgaccagtcatatggaggcggatacatggcgccaagacgggatcgattatatcaactcggttgcgcgggctttctggcggtaaagggggttacactgtgattatagaagaaatggcagatggcctagattgggcttacaaatgaatcccaaggtcgaatcggatccgagggtcagggccaaattattaaagtcgttgaaccatggttctttctcttcatatccactcagcacgcgggtattgcatcactgctcagttgccgagtggatcggttccaaattatgccaaacacaaacaaatatgtactagtactagtatgtatagatggagtactccctgttcaatatccaaaataaaaacagacaatctacaacgtacaggtcatagccgaaaaaagagtgcgtcaactgtctcagctctagtttgtctgaggccgcgtgtaatctatagacgccccgtcagacgcactagagttgtagatcgacatcgcgatccaattccacgtctcactagacacgatttgcagtcagctcgtatcccgaaccatggttgcactcccgaatcgtccggaagatccaataatgcatttttgctttttcagacccacgatacatgtccatcctgaaaatcagcccgagtcataagttgtagatgagacttgatatagtgggtcgctaagcatccctttacagctacctatattggatgcgcactatagacgcctatcgcgcggatcccaaggcaaatccaggttggacgaactaatgtcttcaccacggctacttaactaaccaactacctaaccaactacgtgagctggttaccagttacggacaggagaatagacatctcagacatctgacccgtgacgtggccgagcttagaattataaatccactccagctatccatggatataggatctcacatgccgatacgatgccagccagcctttgtttaactatgggtaccagttctacggaaattggaatgcatagcatatacctacattcccaagctcaccgccacaattccagcgccggcctgggagccagagccaatctcagatcgcagcgggagatgctgcattgagtaaggatctcagcaagatcggggcggggctgaaattctacgatttgaaactttcatgcagggctagcttttttaggatggttgcctccttttccaaggagtgtatgcatcttcctgcaagccatctggaagatctcgctcgatccggggtttcggggcagatagagatacagatacagatcgatctcgggagtatgcacttcttattgaacttgtatacctaacaccttacattgcagtatgttgtatcctgatatagatatatccccctgtctacaaagtattgtatgtatgtatcatctcccgtattacacatacgcaaacacagatcagcaaccaaagcccctaagccaagactggaaccaatagtcggatccaaccggccgggaattcgatgcgtctccacccatcgccccacgatcgcctactattggtctcagccagatagacttttcactaaaaagggtatttccgggcactcggtttcaataggtcagcccacctttcagcaccgatgtcaagatggagtcagccgcgagatccagttcgcacccgggaacgaccggttggggagtcaaaaggtaaacgaaaacgaaggaatttggcccggggttgggccccagcgaatcaggtggtcggttgatctgcgggtatttaggttttggtttggtgaagaagatcatgatattattcttcactgatatagaacacacctaactacaacaaacatagtgcaatatacgtagtacgtaggacgttgaacttgcgtgtcggatagatccgctgcagttagtactgtaatgtgtgcatcttttattctttagaccaacaatagttgatacaatggaataataaattatacttgtacacgaatgtacagatcctaatgcaagtccgttaactattccatctccacggcgaagtccgatacttctctatactgtaccaccgcaataacccacgatataccacaagcagcaaaagcaagaccgaagaagaaagaagacccaaagaagaagaaccttacgctccacccgactacgcccaaccgggcctggcgccagaggcccgagagcattcaaataccgatctacggcgtaccaccgcgcgcttcagctgacaaaaactgaggtcgcgtgggccctccaggaatacaccgacatttctttcaaacagagttctgacagcagggaggaaccgtcgtctccacagcggacgttgttcgcagttcgcagtgaagtattctgtaaaggagtttcctatatgcgatctacaatacggagtattcgtcgacgatctcagtaactagagtttctcggccagatccaaggcttacggcttataggctgctagggacgatcagcagcgtcatacatattttcgatactgtacatactgtgtggtatagcacgtccacaaattattattagctcgtggagatattccttctccggatgtactccgcgtgtactccgtagtccgtactgctatacgtatacggaccgactttccactttccgcttttcgctcttcgcactgccgagtgcactcccgtgctgtgttgtccaagcgcggtggatggtggatggatacacgaaagttcgctagtccttttttctttcttatgatcctccggtacgagatggagattttcacggagaaccgtagggtctgctgcgccacaggaaagttgtggtgccactaactacccctttaccatagttgcccagtccgtagactgaatatagttacataactagtagtgagataatccatcgtggggataagcggctctcggtggatctcggccgtgtttcgggagaatccagacaaagaaatttactaggaaaaatctgttttcaatcccgcaaggagtatcgtatcatgccatgttgttccagtaggtacggagtatgtaacctaagagctgacggtgtccacctagttaggggggacgaatcggatgaatcagcgtgtcccaaaacggaatctgctttcgagggatccttcctggattggctgtgcgccgtggaaatataaacccgtagacagaggtatgtatacattgtcagcaaaattagacagccgacgtttgtatagggtacggctgatcgcatagatccccaccgggatagatgaacgtgggatcttgatctgggatcgatctcgatcgatgccaaccctgctagctgaatatgattatggttatgatcctcggattattggattctcggggtaaacgatgttccgtccaacgtaagcacaagaaaacaaacagagaacacttgtactaattgtcatcaactgaaagtcaaagccgaagaaaggataaaagaacgttgctacttcctaagtgggcttagcgatatccagcccgcagactatgcaaactctccaggccaccggaatagccaacacctccatccccatgtggactggactcacgaactaagctgtcaaatggatctcaccttcatgacaaatatcgagacgcggcttatgttgtgatccaccggcttattattccttacatgcggaagaatgtggcggtctgtaataaggccacctacaacatgctaagataaatacaagtgatattgtagtaccccgtacatgtctatatcgtaaattgcttatatccaatccaaagaatgtattggccatacccaagccgtaatctaattttaatctaaatttaatttgagatctcatgcccgatcccgatcccaatgtagatcggatctgattatctgaacacaaataccttgcagcgaatgaccgcacgccgaccccccgctagttcaatcggcggaaacttagttctcagtcgggacgatctggtgagttggtggtctttttattggggaatttggatgtggaaaatttagacgatcagctgggatgataactagttcgttgctccatatatggagatctttctggaacccgcgaatttaaatgacaatctaattttgatatcgcatatattagcctaatctgcacgttcaatatctagggtagcgaatcagggaggatcatgccatattgggatgtctacgcttatgagagatggatgcgacccaaagaaaagagatcatgccataaagttaggtgtgaatcagattaatcgagtaaagatctgtagtacaaattcaaagttgagattttgatgatattcaattagtattgccatcccgagccaattccagggatatccatatccaccacagaagaaaaaagtgtcgtaaaccttgaacgtcgaaaatatcgaccagaacataaaatagatgtaacgctgaatgagacacgatcgtacacatatcatatcagggacatactcgaacagaagtggaaagaaccaagaaatgcagggtattgagagatagaggggaacatggaggtaagaacagaacagaacagaacaaaacaaaacagaacatcaaaaaaaaaatcaaaaaagaaaccagtttcagaccaggccgatggctattgaatcatcaaagggggatatctatgctaaagccgtttttctcccagtaccttggaagctgttgggggtattataagaacaccgagtagggaagagccccaaaaagacaaaagaaatataaaaaaagatcacaaagggaagacgttagacctcccaaaagaaaaaaaaaaatggccactgaactccgttgccttctatttcccacctttttcaacgccgaaaaaagaagctgaatgactgagaagctgactgagaagctgagaagctaatgactggttggcgaggaggagtcgagaaccgacttgggcttgagattcgaacccaggctcgccgctttgtgagcgcccatcttgcgagtcaatttggcgtaatgtaggccgcatgcgttacacaacgtccgggcaccatctgggccgcgacgccattctggcgtttcggctcggttgcagctgtggcaacgaccaggaggcgcggctttctgcaaacgggttagaaaagtgtcaagatgtcaatacaggggaaagtctagacttactccgcgccgtttctttgggtctgcgcctgcgaaaccgcccgtgcctttgaagtcttcctggtacatcgccatatggtcgtcttcggtcttgaacgccttgcgctgcgccatctgttcagccagtgcttgctcctggttcaccacggcggtgcgtatccgaatcagggcatcctggttccgccgttgcatgtgaagcatgtcctccacttcgttgagcgaagggagggagcctaacagcgggccggaacgctgcgtttgatgtgcgcgagacgcgtagtgccgtgaaaagtcgagggtgcgcgtactcaagtcggcgagctatttcagtcagtaggtaattcatttaacaagtcattcttgattttgtccatcggttcaaaataagactcaagggcgaatccatacctcattcaaagatgtctccacatcatagacgtccaaatgccgcttagactcgttgtgcggagctagtcgactcacaaatccacccttgacctcttccacccgtggcgcacccatgtaggcccggttatcgtacggagccggcgccggaggatacgagtggccggactgcggttgaaaagagtagttcggagggaaatggccgtacccattcggcgacgccacgctaccggcggaggttggcgcactgtactcatacccggacgaattttgcgaccccaccgaggtgattcccgttttggcgctctgggtcggggattttcccgtgctgagggagttaagtgaggtgcgcgaatcctgtgtgttgatggaggcgagactggagcgcgatgcatcctgcagctgctgatggtacgcgggttcccgcatgagagaacccgtcggcgggccattcgaaaacggattgggcgggcccgctggtccctctgcgctcggtcgtccgatgagatgtggcggcggcgtagggtgcgaggattgtggtggcggggcggaggttgctgctgggtatgggagagggtcgttgccgagggcctcgtggatggatgggagggactgtcttgaggtgcgtttttccttctcgtcttcgagggcgcgacgggcctcgggcgacgagatgtaccccggcggtgcgttcgcgtaggcgtacggcagggattggccgtacatgacgttgggactcatcagagtcggagaagcggtggcgctcgaagggtgtctggaggtgtatcccgatccgtctttccctaggaaactcatcgccggcaaagggtctctgtgacgaaggtgagcaatgggagaccgactgcgaggtcgcaagaccaacctgtgcctagatgcggcttccaaagaccccatcacgttgagaggagagaatgttgatgcgacaggtctgggaggtgagaagaagggaatgcaaatgcaaagtcggaggtcgcctctggtgcgacaggaaaagcgttccacctgttcgtgccgaaggaaaaaagaggcccagatccaagatccaatccaacgatcccggggcgaaggttggaaagtggcgtttagatggagcccgagtaacccgacgagttaaccgtaattaacttcttttcttcttttcttcctttttccttttttttccgttccctcttttttttcagatcaatgaaacttgggaaatcaagagaagagataggaatccaagaccacaaaggtaccttgaaatgcaaaaagaaaagaaaaaagaacccgatcgcacatgcaagggatataaagcgtggaaatgagaatgtccatccaaatatgaaagcacgaggtggaatggggacaaatataaaagaacacaccgtagagaggggaaaggcgcagaatcaaaggggatcgaggctacttcatttcgggctttagattggaaacgggaagcttagagaggagtacggagtacaggaagttaaattgatttttgattttgaattctataaaagattaaaggaaagaaaagaaagcccaaaagagaaaaagattaaaaaagaaactttggcaaaataaataaaaaaagaaaagatcgagatccgaacagggggaaaattaccctgggaaattgccagatcgtcagaacctggttttacaaggcaaattaccgactgcggatcatcgggatcttagggctttagttatctgtgggtggtgggtagagctgtggatagaggctgtgcaatattgtagttagcatgacatacaatataattacatacttgtccgaactcatctggtaatgttcgatacattactacgatgttgatgttgtatgttgttgacccacaccatccaatatctagaaaaaaggtaatcaaatgaactgcaaaatgaactaatttaaattaaataattcagaaattagcctaccccggaacctaggatcgatcgagattaacggccgattctcaacgtgctaagggacggctgaataccggcagagtggtccatcaggaaaagaagctagcggacgatagttccagtattctggaatcagtattctggaatcaatctattcttatattaaataacaaatagcgcagggcaatcatcgagtcatttccagatcgctcgacgaggatatgcacccgtgtcacatgagagagatctccgatgcaagtgggtaaatgtcagcctcgggcgatgagctaaagtcctggggaggttataagtgaaggatatgatgtcagatctactataacatagtaatggttagatccattccctggctgtattacagatgcaacccaagtgccaaggaacacaagaataatcaagatctctggaatggagacacagctatttccatcgcaactgggggaatcagagacgtggctgaggttacacagtccgatctgaaagtgcccgacgtggtccggatgacaacgttccatggttcactcgagtttaaattattttatctctttgtttatttatttagcatttggattcattcccgttctacttgacatactaccatctacctatgacttggaatatactatgacatatacttcagatgcaatccttaagtatccaaatactacctacgtcaccgagccacaacgtccccagccaagatcgggcgcaggtgaaatcacaaaacaaaaagcaaaaaacgccgccgaaagcaattgaaaaacaaaacccaattaatcaccacctcattcgtccgtctgacacgctacccccttgagtacccgcctaaaggatcggatcgcagggtattgcaacacatgttgcttaagctttagatcgagatcgaacacgggacgtttattggcgagatcgcgtgggcactccatctcagtttaagaccctgatattacagtagagacattacagtagagctgattatatataagtgagaatcagatacggaagaacagacagtcctagcaaagtcccgcatcaaaccccgctccgatagtgcctagcgctgtctctatagtggtttggaactttgggcttccaatgactaattccaccgattgactccatgaccaactaactattccgtgcagctcgcaaaagcaccgaaggatcaaagctcgttaggaaaccaattttctggagctttgagtttgttggccacagccccaccccgttggatgtcatattcgcccttcacgcgctggcatgtggacgaatcttgtcttggctacggaggcacggagtactacaaatcaaaattctccattctctagtttatcagtcccagtccctagcggtggcaagtacaactgttatagcccgattcgcctccgtgatcgcacagcgcacagactcgggacccatagtgatgtacgatatacatcgtatgggccaacggtcggcccaaggtctaaatattgatccaaaaccggtgaaaggtaatcgcgtgagatcttcggaatatcaatgcggttgatcgacggaggacgcctgaaggaatatgtaatctcgatcagccagccatacggagtacaaagaatatatgatatcttttccatgcataagcaagagcaaagcccggtctaatattccccaatatatattgagtcagtaacaaggctcagctcagctcatgcacctcggtgtttaagaatgaatgtagtagcgtactcgcataatcgcgaatctcatcgcacaatggacttgttgacgggtccgaaatcatcgcgaatcgatctagtcagtagtcgctgcatttccagagcccaatgcaccagccggatcttacgatttcagccactctgcgatgcattccgtgcgcactggagatttagcgcatgcacggtaggtcacttccacctgccgagcatgaatgcagtaaggatctggcgctgcgattgggggggattctccacctgcaggataatggcgcaagaataatcccaatgctgaatctgaggatgagactgatcacaagagatctgaggctgaactccctgcgacggttacatttggatatagtaatatagaaaaagtacatcatacgacaagccaagtgtggctggggcgaccgtcaggggcgaatttccccgcgatgtctcgatctgaactatcagaatcgcaactggtcgcactcgcactagcccggtcgcaggacgctatgatgatgatgaatcataagtataattcctgtggttgtttttaatacgggggaaaacagagctagttttttatgtcagttattcttctggttgcctttttacggcaactgggagtgcaggatggattacagacaccgtgacggtggttttttatgggtcgcgttccactgtgaatatcacgggttttgcgattgagctagctggtggagaagacgaaaatctctgctttcggaattgaagatattcagaatttcacgtgtttggctggaggtatttgagatggccgcaaatgcgccgaaatttatctgtagtaaccaatgagatgattctacgagattatccttggccaagcgcgtcttcctcctatttacttttactttacggtacaaccgctagtaggaaaatcattgcctttgcagaaatgactttacaaaataactggagacaacggggaccactggagatgatggagacaactggagccatgatcgtagtaagttgatcgacaccgttgacagaccgttgacagcccgttagccagattccagaccgttcaaacattcctggcctcgtcgagtctgacaaaaacaatcccaggaatgttgtagcacgctatgatgtttccgaccaattgtggagaacacgcgataaacagacgatcccagactcctaaccggaaagagatgagcgacaactcattttcctcaagttggcaagagtttaggatgcgatcccaattttagtgcgcgtcgagggaggactatccctttcctccgacatcctgaacttatcaaactatatcatccataaaaggggggtaacctcccaaactatctgatctatgatccaagactattatggagaaaccaatctcagattacagattcatcaatcagccaagaataatcaagaaggtgatctcaatcccgaaaataaaagaaacatccccctcggatattataaggccagcacggttcacgtccgccgtacatagtaaaatctccggcaatagccccagtcacacatcatgccatcacccgcgactccgaaatgtggcggctcaggagatttgtttaattcgcccggtggggacgttcccggggatctctccgatctggacggagtaggctcgaaagagtaagttgacagctgcaagttgaccaaaggacaaggacaggggggggcagggagaagaaagagagggtccgatcccgtccagggattgaccaaggagagacggcacggtggggaagatggggggtttggtcttggaaatcaggacacatctgcaacgccaatctgcacgtacggcaaaggaacggcaccaacgttgactggctcggtttggggactagcagggttctgacacggccggaaagggataggcgatatgacgggaggtgatgtcctgcaagatgcaagatgtcttagtgtgtcttactgggctacagattagaccgaactcctcatcgaagtgttagatctagatatcctaaagttgggaatgtcttattagctcggtcaaattattggtaagggcccgctctatagaatcaacatacgattatggtgatattcccccaagtcatatacggagtatgggttgaatccccactggcctctatgattcaacgacagctgcacgtttcaatcgtccaagcaacagctcagggatttactccttcttctccccatgtggattataatcgacagaccgacatttagaatctccacggtgacaaaggggaaatcaccaccaaggaaaacggggaaatccagccggaccgttcccagactccaccaagcccataagatagaccgcttcgatcggcgggaaggatttcgggttttggcttgtcgggtttctcttggaagttcctttttgccttttctttttctttttcctctagctagcctaagacgggctagctcacgcgaaaggttctcctgagattaacacgattagtggccgtttttacttccatctacacctgaaataggaaggcaggtccagcatctccacaaatcccgaaagaaaccatgatcgcctgggaaatctccgagcaaaggtcggaacggactagcagcgcgcaaagtacgtgaatggtatattgatagcgtcttcacgacgatctccttctgctacggaagacagacccgattcatcgatctacgatggatattgcagccgctaagcagcatgcctgacaaacccttcttcaatctcgaacccacctcagcctaaccaggccggagccgagggccaacggagattaggttgagagattggggagattgcaactccatctgctactctatactcagccacacgaggaaatgagaagaacggcttggattaattaagatccgccggtggatcccgagtggatagcgacattattccctccaggtttccatctttccatggggctccatttctggaatatccgagattgtgttcattatatttacggagtccgttttggtgcggagctcgggagttatctgccgttgggcctgtgctggttgcaatgatatacgtactccaatgtgtgcgaaattggattttgttttttgcgggtcgagacggagcacagttgctggatttgtcttgagatttgctgccgtgtgggggggttgtcatttctgggcttgataatgttgcagtgtgcatccgttgggaggtatcaagcatatctattttaagcagatcgccgtttctttgccttttgggtttatttcattccagctaccggatagaggatggcgcgatacattatatggttgaccttcggcgatctctcgggcactttgagtcttccagatctcagtacggcacaacttgtatgagtgcttctgcaaaggcatctacgtatgatggctgtaagattgtacaacagacaaggcaatcacgtactataaacaaggttgtacatgcagttataaatcatatgcacggaaatccatccgggcctgattgagtgacggactcgcgccacatgccggtgaagctcaaaacgcttcgctattggacaggttggatgatgatcatattggataccttccccgtcgctgtcacacagaggactagcaaggatgttaggaccaaagcttcaacgaggttgcttggcaacaggttatcatatttattcttgatattattcttgatatttgcaattagtattactactccgtaggagatctttttccaaacaagtggcaaatgcatttctcaccttcctgacttgtaacatcagggatttcaatagtaacagatatatatacgaatgcgagggttgatacaaccgcgccaatcacattcatgtcccagtccaaactcaaagcgcgaatcgagggtccagtccagatgcacatcccaagctgcaggtatggcccattagagccttgacaggtgggatatgcacccaagacttttgacgtatgcattaggaacaagcctagccctgttacatatcgctttggacgaataggatcccgctggtgatctcgaatagagtttttcctgaatctgagctaccacacgccaaataggaagtcttccgctgattggagagctttgaatctgacagctgcgcggttccgacgttccgcctgaagagaatgccatttggaatttgatcacttggaatttcgcatgaacctgagaatgccatatttctcccctcgaagttgtatttttatgttttctctgtttcttcaaagacaaaagtacgaaatcctcccgctttgatctcacgtatccacccgatccttgttcactcatactccgtacttttatggaaatctccaatggaagttaacagaaagaacgggttcgccctgagtggccctcgtacgatggcaatttgagaagcggagccggccagaaattttcggttttatgttttccccgtacatttccctgccaatgggccaatgacctatctcaatgctatttttgtctcttcaaggggaagataactggccgactagtggcaatgggcccagcggaaacagatgccatcgacaagcataacccaaggatcggcaaatcgtcgaatacactaaaacacatgggctgggtccccgcagatccgtgtcatatcggttgaaaggggaactgccgtgaaaacggcggtccacggttgatctgacagggtgtggtagggtcttcacggtggggagaggtgggccagagaaaacacgcctccactttcaataattcccgatgaacgccgtaatttgatccccgataccgagtgaaggggcctgtacctaaccccaacgcagtcagggcgccggcggtctgggcagcgtgggcaatggatttacgcgcctactccttctccctttgagcaacccggcgttattttatgggcgtcaatagtacatacatagtaccctccgtgctcgagttccacctctgaagaaacttcacataaacttcgataatcggtgttgtatggcatgatggcctgatccactgggaaaagggcatccatgtgtcaccgcggtctggcgccaatcaattcgtcgcctgctggcccctccactgctgtccacgatgccaactccctgggcctggctctcgggtcgacctactccgtaccttttctgtttcggatcttatagggccaatgataggagtcctgggcccgaggcttgagcggcacagaagcgtctctttaggctaggtgcaggcggtaatgcaatgcagcttgccgcatggagtacattgcagcgggataactcgaaacagatcctgactatctcgtgcggagtgagtacaaagtacaaggtacagggtagaaagtacaagcacatggagatgggtattgtatcagaccgagtcaggttctagttatggtaaggctgttatttgtcagggctattgtgcttgactcatgagcagggacatattttcatattgattttaccaatataggataaggaaacatttgatcttggtcttattccctcttgtattgtgcttgatcttatgtatgtgtgaatatatataatttgatgcattgatgcgctgatgcatcgctggtttcaccgtaccaccaaggttgtttgcttcaaagcaggctacatatatatataccactctctatcaaaatatcaactctcctttacatctccatctctagtaaaagtcatcaactcatataaacacaacggcgtgaccatgcctcgtcgagcggcccgtgcacggagcttggcctatccccactttgagcttccagtaggacacaccttcctcttcaatttatttttaggtccagttgcgactagattttttaacgtcatgtcttcaatcctagttctggctgatattcctaccgtgacacttctgtaccgtgcaaaaaagctcattccttcgtcctcgagatttccgccatcccagtctctcaacaataccatctctatcgtccgcaatgacatcaccaagctccaagtggactgcattgtgaatgctgctaatcgttctctcctcggaggtggcggtgtggatggtgcaatccaccgcgctgccggtcccaagctacttcaagaatgccgcggtcttgatggatgtgacactggcgatgcgaagatcaccgatgcctacgatctgccctgcaagcgtgtgatccatacagtcggcccaatctacagaaaggaagaagaccctgtcacgctccttcgatcctgctatcggcgcagcctggaactagcagtcgaaaatggcatgaagagtgttgcgttttccgccatcagcaccggaatatacggctatcccagtcgatacgccgctgaagatgccatcaaagaggtgcggaaattcctggtcgggcctcatgccggaaagctggagcgtgtcgtattctgcaactttgagcggaaggatgtgattgcctatgaagaattcattccgtgagtttattcatttctcgcttttgagcagatactgatgatgactatagtgagtatttacctcccacgccggaggacctggctcagagcagcgacgcttgagtagccatgctaaaatgttgctcgccttgcttggtacatgccccgacacgattgacgaccgctactacatgacctgaacgaaacataatctttgccagcctgtaataccacgatagctacgaaggagatttgctaaatattctaaatattccttgacgaatcgtaagtcccagtgtttctttctctatactggtaacacgtaaggcgaagatgagacattgaccagttcgtacccatactacagctgtcatatcagtaagtgcgatgttatcgttgagatagtcctgtaagcagcttctttcctctctgtattatctcgacgtagacaagtatcttagttacgatctcattcctgagatcgtccacaggtgaatgcaaacaatgcaaacacctatcagatcgcgcctcgatcacgattccagctcgagatgacttcactccaattccaattgcaagtctctcgataaccaaaaccgcataatgaaacacaacaaccctcactgaacaccccatctccaacaaaaccgatccccccgcaaaccccccaacccctcgccctccgcccaacaccaaaaaatgtcaaaaccacaccggccaagaggaataccaaccccgaattcacggtaccgagtgcaagtccacgaagagccaaagcccaaaatcccagatcctataacatacgagggtccatccctctccaaaaaacgaacacccttcatctcccatttcttcacgaacctccgccaacgcctctccgccctcccatacccagtccgacgagcatgtaggactctcagctgggcggtaccgatgctcccgatcgcgctcttcattccagaacacgtaatgcaggtgatgtgggttcgcgggccgtcaatgacaccatacctgaacgaggagtatgagcagacgcacacgaagagcgatatggtcatggtcaatatgtggccgtggggatctatactgccgtttaagaaagagcggaagttggagcgggggatgattgttactttccggtgggttgagtgctttgctttgctttgcttttacttcgattttgagttttatatcttgttcttttgagtcgcgtgcagccaatactgatatattacgcatagctcccctgcaaacccgtctcatatcgcgatcaagcgcatcgtcggtctaccaggtgaccgcatcacgactcgcgagccgtgtctgcggaaaacgcagattgtcccctggaaccatgtctggttggagggtgatgcggaggatccgcggaagacgctggatagcaatacgtacgggcctgttagtctgagtctgattacggggcaggtatttgcggtgctgggaccgcggatgcggtggctgaattggacggactgggactctgataaggggaagggggagtctgcgtcggatgatgcggcgtatagacagagtgtgcgggaccgtgttctgaaggatgctgttcagctcgagcagccttttttgaattgatttgttatagatggggcttggcgtatatcttggcctttgtatttgttgatagtgctggatttcctagcgattttgactgggccttgtacatatattagggagccttgtagatatcattatattactattttgagtaaaatgctgtgctatgcgtgtgcgaaaagagcaagtttgcgagaacgaaaaaataagtgaagacgaagcgctataaaacaggaactgaatggctaagaaatgcagacaaccgaggaaatgaatcagcgatctagagaaacaagccgtatatcttcatgtttctcttcctggagacggtcaatctccgaggaaatactcatcacccaacggtccttttccacacgactacgtgttttaaagacgatggtgcggccatgcttgcccagcgtggacacatgacgcaaggatcgtttggctttgccttcttcccctatttcctgggctcggaagtagctcttactcaagggttgccagatcacgaaggtgatagcagtatcctcatcgtgacttgtgaagacatctgaatcgagatacacccgtggtaaagcatgcacaccagggttattgctgtcgaatgtctggttggcatacagcaagtcgttttcggtaattagaccagaataaatatagcaatcttccagctcgatggatgtttcaagttcttgatggatgtgtgggatcacggtgccatttcgccggcgcagtgtgctgcggaaaattaacagcttgcctgctgtaaggatgacatcgcattggtagaaagtggtgtggcgacggggcttgcggtagagggtgccggacatctgttgatgttgtcagtagggtgcatgtatttccgatgttacgctacataccttgatagtccgacaactagacagcgagcacatgttgtgcaagtgtggagatgcctcggctttcgacacctcccacttcttcgcgaactgtccgaaaacggattccatagcttcgtcgatacccaacagcttgagattgcgctgacgtacggcctgcagctccgtggcatcgtccgcgcagcgaatgtgccaatacttcaccagcgcatcaattcgtttgacccactcgtcccgtgtggcaccatcgtacgcctgcagtcgaacgacaagaccattgtttagaaccaattcaaatgttctaccgtcgtcaaactcttgcgttgccccgtcatcccgtcgtgagtctctggtttggggattgaagtccacagcaggtccttccccgatattgggatcagcagggcagctgccacgatagacattgcggacttctgtcacccgacacatatcgatatacccatctgcctggctgatattgtgtacattcctctgcacgttcgcaaaggcctcttcatcgtgtcgtttcacgaactcacgattgccgctggagagccatttaatcttgttactttcaaggggataagggtcgatatcccaagagagcggcatttgatccaatatctcacgggcacttggtacatttccttcttctgggggatcaaatttcggcggtgacgggggaaatgccctggctggccgacagaacaacaaataatgatcttgggtaaagaagtacagccgtttgaggaacatcttgttcatccgctgatgcacacccttctgggatgtgagacggactaggaatccttcgatcggggcaggttcctcctgtacatccgggtgtctgattgtagtagagtaatgatgtcttggtcgtagctcaagctcgtgggatgactgcatcccaatggtcccatacatcttctcctcgttgactccaaatacccactcaagtcggtcgtaccgcttccaagcaagtcccatcttctcggtcttggaccaagctttcaagacctcggcccactcggcacggccttcgagcatatccatgcatcctcggatgatggtagcggcagcaaacttgtcatcgacggctggccggttaacagttggattgtgctccgtatcagaatcatctgctttcagcccttcctctatccgaccgaaaggattttgaaagatgagggaaacccccagatcagggacgtgaatagggagggaggtgggacgccgccatccaagcacctggcggatgaaagtgtaccattccgcagagtgcgccgaggactttggccgaaggataaatattttggttccatgcttgcggggacgccaaataacgatggtcttgtcgagaggggaatagaagttaacatgggtatctttgtggttaagctttacttcgtaataaggaggcgttttgctgttcgcacgttgcatatcaggaatcacgcgagtgcggtacatctgaatggcaaatggcgcatgctctatagagcttttgcggcatacgacgaggaactctcgccatttatccacggtccgcgtttccatgcgcaaactgtcattctcggtataatcggcgggaagtctgtcctgcagagtctcctccacgcagaccagcattttttctgctttgacaatctctccgtcctgcactttccggcggtgcggtcgcttggcagacatagtaccttgggtctttgcaatcttatggcgcatcttttgctccttgtgtctgatgttgtcacccaggttgtattttgccaccttcgcagggattctccgttggattcgcgcatcttcgccagtatcatcttcatcttgtgggtcgtggtgttgaagcgatgctcgagatacgccagatagcttgcttttatgcttccccttgtccgtgtccttgttttgaatcagctgagttgtcgaatcggcctcgcttggaactatggatgtattgatggttagagggttgggagaagaatgaccggccaaatttgtatgatgtgagcccggggactttggtcgcagctcaggcggttccagactgctagatcgtacggtgggtattgatcgactggtatcagggctgggggcctcttctctggcggtgacaaacgaagatgaagcaacatcattgctgtctatgtcgtattgcccccttggtctggctttgggggtgctgtctgtatcttcgccgctgtctccttcgctatccccggtgtttgctctgtcgtattccccgctatgttctctagtctctgtgtcgtctgccggctctgtgggtaaggggtcgtcaccgctggcctcagctacagggtgggttagggtcctcagttcccccacaggctctgctgcagattctgcctcttgtgtttctccttcaatctcatcacatcgctccgcagcagcatcatccgtgcttgtgttggtaagtgccaaagcgacctgctcatccaagtcgggtgacgctggggtgggctgatcgttgtgctcctcgtaatgggccgcaatagggcttgcagagaacgtgacggcatgcgatgtatagtttctgactttcagtcgagacctataccaagacttgcgatgaccgtgcagccagccttctggaattggaccaacgaaaaatctccggttcgtcatgtgcaaatgtttggcagaagcatgacgctgtcaagaaatagatcagttctgcaactcaactcaaaggatggtgacataccaattgctggtctgtgtatgagccagtccgcaagccatgataatcttcatggtatgacgggcgggagtcgggttctggtcgtgagccattggccccgtctggtggagagctcatgtcaatctattatgcagtaccctggtagaccaaatggcatgcaccagacatatgcaggagcaagcagatggcccaggcacagaactttcgatcgccatgtgatatggtccgatgacgtcgctgccaggtcaaacgctgcaaacgatgcaaacaagttgttgacacttcaccgcgttggtcttgtttactctgtttgcatcctcccgtggtctccacatcccccgtgccccgccattggcttgcgtggcagcagcggtgaagtcgataatatccaagggtcccctgattaagctccttccaaggtttctctttctctcactatctatcttctacttgaattattctgtaaaaatggctgctatccctgctgacggaacatggtttgataccatcaacaagtccttcgccgatgtccctattggtgcggacgatggcatctcgaccacggagttcctcgaggccgccgagtcactggtgactctcttcggtgcgtattgttcccttgcatagacctgcctcaaactaatgcagagaacatttagatgtgcttggctctgccgctttcaccccggtcaagaatgacctgctcggcaacatcaaggttcgtccacattataccgccggtgtcaacccattctaaaaccccaccagaaagtccgtgagcgccaagaggccgctcctgcagagtctgagaccctgcaggcccttgtcctgaacgaattgaagaccggcaagcatgtcgccaccgaaggtctggtctggctggtccggtatgttcacatgtctcgatcgtgaaatggccaattgcaatggcatctcttcgatttgcacaatctgcatgaaccattgactaatcattgttcttctcacagaggcctcgacttcaccgtccaagccctccgtaacaacatcgacaactcctccgcggaactctcagactctttccgcggtgcctacggcaacaccctcaagccctaccactccttcttcgtcaagcccatcttcagcgcggccatgtctgccacaccataccgtaaggacttctatgcgaagctgggtgaggatcaggaaaaggtcgctgtggcgatggccaaggaggtcgctgctttggagaaggtgatcgccatcctcaaggctttccaggctaccaagcctgctcagtggaagtaagtttgccctggaggccttaccactggattaaacatgtgcactgtgcaacttaatatgtaaatattcgatttgggttcattccagcatgcgagtttgtattatgtagcgaattcactgttttggtcaatctacctaggtagagcatggcgtatggggtcgagatctgagcgtcgcgcttataaatcgtaagcttgcgaacgggacccttgtaagaagtagatcagtcggtctataataggacacggcaagacaactcgcagcatacgtcatagcaagcttgaagttctgctgccaataccgcgcgttcggttcgcttgctcgctctcgttccatatgcgacgagcatgtacaaccgagggcagtatcacgacccgttgacttggtacggagtactccgtacacttgagtaggtagatcagcctctatctcagccccacaggtaagtgttccccgaaatgccgaggtcagggggagataacccggttatatatctgccgttttaactttgatctgtcatatccttaccaaaatagaaagggttccatcttctaccgtactccataccgcgatccaaagttagagagaatagcctctcggcacttaggtccagagggcctgacccagaagaccccgtgcgccaaggatattctttaccgatggtaagggtggcctgagagtcgggtacactgagacccatatttgattgtgatctaggagtataagtaaatcccggggtgatcatatattgtcacaataaggccaggataatataggctagatatacaatagtattgtagtgctcatactgatacaatagcagcttgacatataggtagtcagagaatggtccaaagacagcaagattgtcgggatgttgtgggtcagaagttagtgccaggtaatttccgacacaatatactgcagatcgtaccacctccgccgaggtccccgctgatcgagtgtttcgtctcacactggtgactggaccatctgaaggtcttcccccttaagaggagacggtttgcgtatcaatcagatctcgatatcgaaactccagatcagttcatgtccatcagtccatctgttcgagatctcgggcaagtgcgggaatatcgtcaaatatttgccaatagtttccttggcaatgcatgtcacaaaccctggtcaaggatcgtctactccgtaccataccctgggattgccaggttgaggataggcgggagtgcttcccctgacgacggatggcaactttggttagggcttcccgttgtagaatggtccgacactagcatcacggtagcatcgcggtatatacggagtacacaggatcacggactgggatcttttctagcgactccgctggtcataggtgattggcgggaatcagtggagtccatgggctggtatcatagttttttggcttcccgacgtcgtattcagaacagtcgcccggcttccacaagttcggtgcgacttctctttgaaggctagattccgtctttgcatgaagaattttggttgctggaggtgttattggaagggattgccgttttgatttgattttgagttctcgacctgcttcccccacacgtgaaaccttcacggtcccaaggttccagcagctgtctaaccccatcttaaccaacatgcatatcaccgttggccagggatattgactccgtggaggcttttaaacggggcgactttcttttgcctaattacctaattaacccttttcgccttttcttttcttttttttagaaaaatcgaaacaactaggatagtatcatggcccctctcatgttgtagcccgttctcgccactgatgctcgtgatcgtaaggcttgatctgcatggtagcgggttttcccttagggtagtaatttcctctcgctaatatatcgtattcttgttgctccttcggatatccttgcatacttggtagggaaactatacgggccatgaattggtgaccatacattcattctcccggtcaagatgttgcccctcgaaggccgcagcgagtcaatctttatcgttactactgtctttcttggaatttcattcattgccgtggttctacgatgcttcgtgcgcattcgccttgtcaaggcctttggctgggatgatacctttatggtatgcgccatggtatgtatgatagtttcatgtgcacttgaaaccggactgatcgaattgcagctgttgaacatcctgttcgctctatgcggtatcactggcgcattatatggaatgggccagagatccgatgatctcgtgaagaagggtacgatggaaaccgcaatgtttgtatgtccaccttcaattccaagatgaaaatcacatgctaaaccttcccaaagtggtggtggctcggtcaaaccagctatgtgtggacctgttcactagccaagatctccatcgcgttcgcgctcctccgcttgacagtctctaatccccacaaactcgtgttatgggctgtcattgccgtcacttgtacgattggtctggtcttctggttcatgttgacgctgcaatgccaaccggttgagttcttctggcaacgagttcgcctttactcgaaccctcatgccaatgttcatggcacctgcatggagctggaccatatcatcgccatggcctatgtctacagtatcactgctacaatttgtgatctgaccctgggtcttttgccgattgccctggtgtggaacctgcagatgaacataaggaccaagtctgccttggcgggtattctgggaatgggatgcatgtatgtctacccttggaaaccctaaaatgagacttagtactgacctattgatttagcgcgagcgcagcagtcatcattcgcattcctttcttgcacgactacaaggatgtcgacttcctatgtgagtttctattcttatacacactcgataagtgagatgatcaacaactaacaccacactcccagacgcaaccaccaacatctcaatctggtccaacgtcgaagccggcctcggaatcgccgcaggcagtctggtaaccctccgacccttattccgctggtttcgcgatcccagctcggcaggaggaagcaagagcaaaaccaagcgcaccggcggcagcatacccctctccagcatcaacggaggccgctccaccatttcaggcccgcaatactggcggccagacctagaccggccagaccaacatgccgtggtaacgacgattcacacctcaaatgggtccgccactagccggtcaagtagccaggaagacctgaacccgaaaaacggtaccttctttcagggggtgaatgtccaaaaaacgttttatgtttcggaggatcagtcatgactggctgtgccggagttagataggctataatatatctaaactttaatgtttccttttttgctctttgccttttgctctttgtttagaacaacggcttgtacggagtacacgataataacgtattctacactgccccgccccgaccggcccccagattctattctcacacaccgggatccacgtgcttttgtcagttatcatgattcattacggttcgcgttcattaagtacatggtatggatcaaagccggcgaaaggccggcatacgctatcccgcttgtagtaacagtcccactctgtcttgctagtggcgcatgttccgatagcagttgaaacgagctagctatgccggatgacgttgtctagcctgagtgttgctctgtgtatcctctttgcgcaggcggaaactgacatcggtaaaggcggtaatcacatcatttttgacatatatttcatttcttttagattaactggctaagcgcggcacagtttctaattcgatactattttaaatattatgttgttcgaggcttataccgatattgcacggcatggtgtgagctcccaggggcttcgtgggcctatgatattgtaggaagttgctggagctgggctaattcatccgtgccctagcctggacccttattagcgtcgttcacacctaatgaatatggcaacaatcaacaactgactaactagttactagctatatgtagttatttgtaggcacgttccagttgcagggtcagtttcgagttctactctttgtctccgatatcgctcggtttcttcatactcgtagcagcaatacatattcccgtcgtctttactccgtagtggataaggcgtcttcggattgggccgacatggtccccgcttcgttatcagatgattccccgggttgaaaactcgggattaaactcgaggcgcgcacaagtgtcgtgttgggagagccgtttgagcctcttggccgcaatgaatgaaattccacttcatccatgttttctcatgattctcgagatcactggcttgggataaagctgcagaaatgtcatcgtttcaaaaaacattcggagtgtctgctagctctgttgattgatcctcttcatccttaccggctgcttggattctagcagtacgagtcaaatgccacattagattgagtaataattggaattaaactatagtgtatgtaacgaagaaaatagtctgcgatctgattcggatgtgcgctgatagatagggagaaaagggcgagagctatctctctagtatgtacaaacgggatctggtccatgcaggcatccaacagtaactcatatgaagatagtggccgattgatcgggtcatcggccgtagccgtgaagatttctcgagtgaacctcatctatatgatatagttcatgtctttagcacagcggctatgtattttggatctttgctctcgaaactttgaaagaatgctcggtggtcgtcctagcttgcggctgggatagggagccagtgaaatgcgatgggcatcggggtcttttgccttggtgatataaataggacaagagacatatgttgatatgccagatacaaatcatgttcttcgtgtcaggaaatatagcctcaatggctttcatcaacgcctcttctttatttgtgagaatcgtagggggatattttaggccaagcgattcatacgcttcggcgagacggtcaaggatgagttcgtatgtgtcctgcttctcgttcttcatgaaggcgaacccaatatggaaagtcgatcctgtggctgcaaagccaacaatggcgagtaacggaagaccgtagcggtttgtattgtacgtatgatccattgatatgacccacaaatcagatttgagcattgcaatatatacaatattgcacaatcctggtatgcgaacttgggttgccagagtgaagttgtatgtaggctttgtgttcatcaagtcttcgcaagctttcggcctccccctttcgtatatcccccgatcctaggaaacttctaggttatgtgaggtgtactgtgccaggtatattgcggaccatgcgactttctcgacgccgatcatcctcaagcttcgacaaagggtttcgggtatcactcggtgtgccacgacgaagaagtggattatttttcagagcagaggagtagatggaaattaaagtgagagagaagtgaagtgcgctcgccaggtccagtcggtgctatcgttggggaccttagctgaatcccagcaatctcgtctccgaatgatcagagttgacggtcatgtctaagaaacattagctcaatatgaccggtagctatgtattgatccgactgaaaaacttacatttagatgtgcttcctcggtgtaagtccaggttgccaaccaccgtgccatggatgcacttaactgggtttgtccgtggtcctcatcaacggagatggaggttgacgaaagaaaggagagttgagagaaagaaagggaaggaaagagggaatgatagtgtggggagggtaattatatatgtcggatgattttctgacaagagattattgaagaggtttgcgttgccatcaaatgtaccaacaccaggtacagtataatcaaattaaaatagcattcaagtagttatacaaccctatatgacagtgtcatatacagttatgcttctcaacgggctgcaggatgcgctaagaccgccacctgcatgtctatattctaccaaagaccttgtttccgtccatggagcactgtttcgctgctctcttcaacagcccggccgggctagctcaatcggtagagcgtaagactcttaatcttaaggctgcgggttcgacccccgcgttcggctattcctaaaaccaaacctgagatttcttttttgctcttttcttttgcactttatgaaagcaagcaccgcggaggtcaagggctgagttccctgtcatcaataatgtaatgctgacacgccaaggattaaccctgaaagagaagcttcccaaagaccggactatatcaagattggaaggcttggtgggtcacacccgcttagtcatattgaatccggggcagccctggacgggataaccatgggaacctcaccctcatgcttcaccttatgatcagcaacaatgggtttgccgcctcttgactcggacattaagttattatcaatcaaaagagacatcagacactcaggcacttcttcgatttatgagatcaatcttggcagcaaccgctatgcaatgaaactggtgggtcatagagtggctctcgctagcattggacttgagcctaatactggtcgcagttccacgatgagaatggagatccaggatttgcagacaacggcagggatttgaatcggtttcgttgtgaatataacgcctataccaacttgctaaatttcgatgtatgcgaaagcgggctcgtcccacgttgctatgggtatatcgatcgcctcgatccatcctcttttcgcccgcacctcgaccatttcttaaccgatgaaatgcatccgagagctatcatactcgagtacttagaaggtgccgaagaattaaactgtgttaactattccgaagagcgtctgcaattggccatccaagggatgaaggaaatccatcgcgctcttatcaatcaccatgatgtttatccgaaaaatatccttattgtacctagtcgaccgtagcgagtggtgtggatagattttgatgttgcaatgtcctttaagacacaagattcgatgggacggaaaggacagttggaatgcgagcatgaagccaagctgcttgctagctttggagaaatactggtaagtcttcccctcgttcaacattgtgcccctataattatagaagactgatatacgttaccagcgcgaggatcaaaagcagggtttgcctccgaatacaaaattttattagactaggatttgcataccatcgtggccatgtctccctaggtgcaatcttataatttgtgcacctcgtaaatgaataaatgtggaggcccacagccaggactatatagagtgagtatatacttctctggattatcccgtcgacaccgacagttactttgtgacgtcaatcttggagttaagagggcactaaagtaagttccgtgtcatcagtatcaatcccaaaaagcttcccattgaacagtgatactagacaaaagacatatatatcgcaattatatctttctctttttatcgttctttcacactcagtcaaacaacaatctcaattccaccatgagctccgttcaaaaagttgatttcctcagcagaggaatcaagctcgttggcgatgtgttcctccctcctgggtactcccccaataccaagtacccggcggtcataatcgcccatcctatgactggagtgagagagcaagccccgcgtgtttattcggaagtcctgacacctgccgggttcatctgccttacatttgacgccgcctaccaaggcgaaagcgagggccagccaaggtatctcgaagacccagcccaacgagccgaggatgtcagggccggtgttacctatctttctctgcgcaaagacgtcgacccagaacgaattggagctcttggtatctgtgcctcggggtggctatgtgccattcgccgcgcaaaatgaccaacgaataaaggcagttgcaaccgtcagtggcgtctgaactggccgaatgacaagagaaggccttgtggaaggaatgggaggtcccgagatgctgcagtagtcgatcaaggctgcaaacgaggctcgactcaccgaagcgaaaggtcaacaggatccagttagccctgcctttcctccaactgttcaagatgcccccccggaatacccacccattgccaaagaattggcagaatactacaaaacaccgcgaggtcagcatgaatgtgcacctggtctgtttgcaactagaagtgcggatcttttggcgaacttcgacgcctatgctttcaactacctgatttcgcctcgtcctctttttatgattgctggcgctgacgctagcacgaagtactacagcgaggatgctatgacgagcgctccttgttcaaaaagcttcggtcgacggtaggcccaatactgaatttcttgtatactcgctctttgagttcagaggaaactccgctggtgagcatggctggaactgcaccttccactgcatcgctcgcgatatatgctgccaaagctgacgagataatcagattacgcatgggcttgtgaatgagcgaatggacgtactgcgaaaatgacaccgcaagcatctttgactcgatagtcactagctccctcataatggaaagctttttgtccggactcagctgatcccaggcgactccaagctgtgtaccagatgcttcttccataatgatgtattccgagccaacggcgttatttgatgtggcactccaatcaaagattcagggcccgggaatttgaaggacatctcgagtctaggttaagcatgaatagccgccgtgcgattaaggttcgaggtaaacttacaagctccatggtagcgacctcggacgcggtggaatagaacgctgggccggcatttgggtttggtatacgagcaagcactattttcccatcattcatgatcaaacggaaagactttgttatatcctcccccagccaatttcgtcatggagatacagctgtctgattgaacggctttggagctcagtaacgttgaaggccttatacctgtccttaagctgctgttcttcaccccagagccattgtctactcgtataacgaaggaagtcttcgtaatcaggatttggtgttgtcatttgctcggagagattcgtgactgtgcgaacgacgcgaaacggaggaagggtagtggtcgttgattgtaaccgtgatggtcctgaaatgagggacgtccgtggttgaaaccaatgtactgaacagtttctcaactttggaaaggctgaaagtgcacgacgacgtcctgtgtcaatgttcatcgctacagtacgtaatgtctggttgggaacggttcaaacatcatctgcgtcgggcgccggaggacgtgtttcgctcaccaggtcaccggtattgattatacctatattgtataccctgctggtaaataccagtactgtgtgacctggtaacctggtaaacccccattcggaggaggtggccgcccgagtttctttacttattagagtcacataactaactaatacctaggcattctataaacttggatgatctagttcccaatatcaaagataacaaatgaaacacctgtaataatgatgggatcggtccccttagtacatcacatatttgatgttggacattacggtgacgcgctttcaagataggccctaggaataacctcaatttccgccagggggtggacctttatttaacccccgaaacatcttgatagaatcatcttacgctttttttttggtttgttacagtgctggcattgtagcatgtcagaccaggccttgtcttctttcatctttcattttcattgctttgctcctttgttccttattcacacgaagctactaactataacctatataaatcgcttcatggtagtcatagtaggtagtagttatttctgtcgttggcatatgaattgaccccaggacttgtcatacctctttgcttactctccaacacggactgctacgtggatcatctctcgactaaacgatataattgctacgcttcgctccgaaatcaccttgggatttcttcctcatatcaactcctttccacgcgatctagttcgcatcctactgcggcaccgtttcaataccaattcctctataatattcaccatggcaggatttcgaggctttagtaaagctgtgaagaaatatacacttctttctctatggatgtgtgggcaagtggtatactttgtgatatatgtttgcgccatggtggtgattgtttgctctgttgtggctttgtgtgttccattgtccattgttttgtcataggttcacgactcctgcgcgaccttctagtcaaattgaattatccaacatggacgtatacaagttgacatctagaatacctattaattcatccccgaagtagatgtatagcaaagccattgattgtacggagtatatatcctagaaagacccaacgcccgatgctatgcacatatcatcgtaaaacaaagtgctcgaactccaaaacattagaaatatagaaaagtggaaacgagagtagacgtgtgggaccaaaaagaagtaagggaaatatatgtgcaggtagcgcgtgtaaacgaaaacaaaatattacaatcccaacaattaaaactcaagtcaagaacttgcctgcggatgccccgtgtaaacaccttcaaaatcaagaccagcgagcatgccattaacgcgatcgatctcacggctcaagtcctcgacgttcatcgctaggctgcttacttcatcgaatttacgccgccggttggcatcggcgatcatttcagacacgaagaacttctgctcttctagcacaatcagccggtctcgaagagacttctcttcggcttccaaggccgagacggcactgctcgtgtcgctggatagactgctattgctaccgctagcggcaatgctgttgtacttaatggacgaaagagcagattctggtggccggagacctgtcgtggagccattaaccggagtactgggtgagcttgtccggctgggtattctctctgacgcgggggttgtatgcttgaggattttcgggagggatttcaaaggtaacatgtgaagatgaaggaagttgctggcttgctgatatatagcctgctgcagcttttgttgcgtgggggaattggtcggcatatcacggatacgtcgagccgcaacattatactgtgcaaaagaatcaatcagtcgcttgcgcaccttggatgcatctgcaatctgagctgacgatggaggtcgtctaggatccctggtacaatttcgttagtaagtgactagaataccagaacagaaaaacatactgtaaagctgtcaacagcttttggaatctaggtagatgaaggcggatgcctctctcaaactgggtcaagttttcatacgccctgatctccgatggctttcgcgtcatgtccgctttgaagtcgcgtcgatcaaacagtgtcgatttgcagtccttgcacagtcttacatcaatattgacaaggttatcgccattggttttctcagaggtggctgtcgggcctattagaacttagatcaaagccacaagtgagggtcgtctcgggacttaccaggagaaatgctcagcccaacctcactagagcatccggtactcggatcaccgcagacaattcgcccgcaagttctgcagtggtgtctgcgaaaagtatagcccgaaaattcctgttggcaaaatggacaacgtgaaacactggcatcatcctgccagctgacaatcgtttgctctatttccttacgccgatcattctgccatgcaagagaccaaagctttgttgcactggggtgtatttgatctggtggcagactagccaacagctgagtgagacgggtcagtcgtttttcgagtcgggagatttccaaaaactccttatcgacggtctgttttcttattgacttgaatgcatccgttcggtccctcacgattcctgttgcctgtttagcttggttcagaattgaaagcaatgtactcaccattatgatcattgtagccctctcttgacttgtagcaggtttcgcatactcgggcccatattcctcgtacaggttcatgatgtgccgcccgcgagagcttcatttggtacatcgtgtgttcttcgcaaaacagtttcccgcaactccgacagttcacgcaaccgttggtggcgttcaatcgtttcccacatgatggttcaagacactcatcgtaaatacaacttgtctgccagtggtctttggttatgagatcctcggggtctagtagtttcggaggttcagggatgcccgcatgggctgctagtgggcggatagggagaggcgcgccctggttctcgtttgactcgaacacatccaggcctttcaacttctggtttaagactgcgagaggctggaacttccttgccttttccatttgaactttgaaccagtcctttacttcatcttggtggctctcttccaggttctgatggatgtcgtcgagatgtctgcggcaaatcgttaatcatagttaaagcgtcacaaggggaaacaatagatcgatacctattcagctgcagcaaagtcatctaaatagaagttagtatcatcccattacatatttacaacaaagagcgcatgggaacaagcataccatctgttcgctgcagatcggacaggagagctgagcccccggagcagccggggcggcagatatcgaagtgtcgccattctctattgaaatgcgggaagtgaggtcttgagtttcggtcgagagctgtgatgcggattgtgagtttagggaaacgctgctggcggtcggcgagagcacccgtggcttgggctgcggggacggagctgatgtgagagcgcttgggttgcccagaacacgacctccacccagcgtcctccgcgacatgatcatgggggcatgagaagctggaatagaagctgtttcagcacaacatccgttggctgtacagaacaaagttggagttgaccggagggaaatgccaattatgtggagccagccttgcatgtggctactggggccgcctgaggcatcgacgccaagagccccaaatgagatttgatattcgttacgttcatagatatgaaggagaggtgtatattgttatggatttcatttagtttagacctattatatgaaatgaaagcattgtatatccctttttaatgtccacaccaaagccaaggtcatctagtagtctatttcctcttttagcagtatactccgtacatccgtggcgcgtcatacaacatacaactacaaaagataggaaagttttttgagatatacccaatttattttatttgcattctgtctgatttgaattgaagccataccttcgccaacaatgaaaccagactagttgagccgagcagtaacgacagacaggaacaacaagactgtaacgacagacggaaacaacagctatagagtcgctaaaacggacaacaaatcaggctttttttgtttttttaaccttttcatctttttttcctgttttcgcgttttgcttcagttcatacaggttcgtggtctcatgccgtcttatatatacaagcctgggtccaaacccaacgcgaattcttcaaatattgagcccttttaccgctcatagtcacggtggtagctggtaccagtgttggggttgtcgtattccttgtggacacgagaggatccgtcgtcaaatcggtcaacgtcgcggtgtcgataggtgccactatcgttcactcgctcgcggtggtggcgccggccagtaggggtgtcgtaatcaaggtgttggtcgtaggcaccggtctgggggtcgtaagttgtggtgccgcggccggtgttggtatcgtaagttgtggcagtcgcatttgtaccgtagccaactgcgccatagtcgcttgtgccatagtcccgtgtgccgtagtcccttgtgtcgtaggtatcgtatcccacggggctgtaggttgaactcagggtatcataggttgagcctgcaggattgtaggctgttcccgcggtgtcgtaggtgtcgtaggtcgtggaccaggtgtctccgtagttggtcatcttgacgatgtgttaagagtgataatattatttgtgtaatctttctttttatggaatgtaaaaagcaccaggtcagtctgattcttataccctcgtcgtggcgctagatcccaggacgatgatactgccctgacatcactcaggcgaccatggacaagtgaggcaatgcggctgaatggacaaagaagataactccaagtcgcatatctctggaaaaggttctgattgatcgagtttgctgcggctttggttccagactgttgcctcagaaggcggatgatgatggtggtatacttctataccccataggattgacagatgattattgaaccccacaagtgccagatatttaggagtttctgtagatttccaatatgataccatgaattggctcgagagagttctgtttatttcgttctaccaagatcgtattcgttgatcgagaccgcgagcagaccttggggttggctcaacacattaggtggagttcgaggatgaagtcgtgccctcaaatagacataattatgggtgagatttggatgtctagcaaagaacaaaatcgctaaggcaagtcaatagcaggaaagaacaccattagacatcatagacatatcagagcacttcaattatactatgttttaggtgtacagccatccggttggctctatgctgatgtcgactcccacctagtcacaattacaattagctatcccgaccgagaggcaccaatgaatccgacaggaattcagtagcgttcatcaggtctgtgcttccataaacaactctccggcggtttccaggtgctgcacgttgagctggcgcaccctcggcacccggttggccatttgttcggcgaacccattcctgcaagttgccgtactcctccatgcttccaccaccaactgtaaagacaatagcctcgctgaaagcttggcggcgctgtccgaagctggcaccggtgccagggcctgcgctaccaatgccaccaggcatttgcgggtttcgcgatgcggatgccggaggcatggcgccacgtgcgttcgcgctcctcgggtcaaagtagaggtagttttcggtctttgcaatggcagagcttgaagctgcagccgggtccatgatggactcggtaatcttggtcacagtgagatccttgttcgctggtaggaaattctttactcctgaaatgagcgagtcgaagttggcacctaaagcgcccgaggtaatgcgatccgtcaggcgatttgaaagtgaggagaacccacggaatagatcggacgattgttgttctggtgcagatgttgtcatcatggtcatacgcgtgatctcgcgcacttggcggacataggcaagagaggagatgtcgggcacgccggctcgtgtcagggcctcttcgaactgagtcatttccgagcggctgagctcagtttcagtgctgaggaaccaaatcacgaacaagcgcagcttgtccaatggttcacttcctttggaaggatcactgattaactccaaaatctgtgactttgattgtttggtgatggtctcttctagttcgaagaagttgtccaactgccgatctttgatacccttgagcagtgcggtggcaatgttcatgtgcatatcaagaactgccttgcgttcccgcaactcagggagcagtgtgatggcggccttgagatgttgcgcggaggcactggtatcattctggagatcttcaatcgaagaggctcccgtcttctttgtaatctcattcgcatcttccttgtaccgcgtaagctcagcatcaatatcctcagccacttgggggaatggggctccggcattgcgttgccagaagaagtcggtactgttcaagtcataagaccttttggagcccttagcttctggatcgcctgcacctgcatccacagtgattcgattcaaacgcatttcaagaacatcctggactagggattgatatgtccacgagtgagagagcattgggactagatcaatgtttcgatccatgatgattagtaccggccgtgctgatggcactcctggcaaagcgttttgattgcccgagaagaggttatctttggaattgaggatgtggtctcgcagtttccgatccagttttgttgcgatcaattccgctgcaccacccttggggcaccgtatgattgggatactacctgcgcagccagtcagaacttcgttcgatgatccaagataggatatgatacttacccattgtcacgctcacactaaacaagccactaaccactttgtcaacaatcccatctaggtcttcatcagtcgtttttgggctgttgatcttgtagtatgcatcctttccaagccctaaactgaagaggtccggttctgccacaataaagttgagatattgatcgaaaacctgcgcaatatgctcagatgcgccagaagtgactatttgagaagcgaaatcctcgagaagtggccgcgggacggaggataggaagttcacgtaggctggggagtagagcccgtgggaaaggtcgcgagtgatcgcctggatattatcgggggttggttccacgaaatatacaaccgggacatctggaatagggtatctttgtgaatgaaggtttcttggagtcttcgttagcgttggcccagtttagggggagaaggcggcgaccatacagatgaatagttatgccccatgcccggaggtcatttaccctcaggacactgctgatgacatcccggcccatattatcgaagaccaagaccttccatatcgggtcaccatcttcattcaaaatcggagtggagtgtgagataagaccgccggacccggactgatcgatggtgttgtcttcaacaggttgtggatcatgattcaagttcaataacttttgaattgatgctgaaagccagggatcagtaaaggtcaattcatttcaaaaatctagcttgcgtcacttaccgacctgtcggtcccggagggacatggattgcgccatggcaatagttggcagcgctgtgtgagattgggagaaatgctcggtttcaaccaaagcttggaaaggtacagagctgcgcaggaagatagctgaaatatgcgcgcaactcttataataatgatgaggttgtaccttgcactgttgacaccggggttcttgctatcgctccacctggcatggatcccgctctgagctgcgctgacataaatattgcaaacactgcaaacactgcaaacattaaagatcatatgtgtttaattctgccatgtaacacaggggttgtaacttacacggcggtgggccaatgaacgaccttcaataccacaattacggtcaattttggtacgccatcgtaccatcggttaaccgccttgccagcagcttttgtcccttttactctcttcttcaaaccaagtcatctactctaaccatccgtcaacacctttcccccaatcccttcttttttttccgtaaagcgaatggctgtgacgctagattggcccttcgtatgagagccttttacttctctgattcctcaaggacactcttttgggacaaaacttaagaccgagaaaggagagcgaaaagccggacaacaggaacggcccaagaagagaaagcaggagatacaaagtcaagaacacaaggagagaggcgccggagaaaaagctgggccatcttaatacttctacgttgtatttgcaactgcggagccttcgtcattaagctgcaaggccaaaggtaacgccgtcagctcgcggaacaaagtttgtgcctgaggcatacaccgctttaatcctgagtcaaaaccaaaagcaatcgttgttttctctcataaggtacgacagtactcatactgcaactcttgaagtccactctaggcgtatcaaacatgtgaattgtctaatccttatcaattcttcagtccagcagctctacaggcccctgttctgccgtcgtgagacaaccagccaatcatctcacttccctcaccggaaaaattatttatccctccgaacctccgacccacttcatccaaaattaaaaggcggtgagcgccaaaataaactccaagccctgtccaggcaggtgcatgcacgtgattacgtgaggcttcatagtaacttagagaagcttcgactgagcttcaccatggagcaatcagctcaaacccctattcaggggttatctcatgggaattcactacctgctgattactggagcacacttgaccccgcctaccctgatcccgagcagcagcttcagcagccatctcaaccccagcaccagcctcaacagcagcacgattctgcatcgcaaccaacacctcttgggatcggatgggaccatcctgtttttcaacagcagccaagagagctagcctcacgaccagatccgaaccatggcatttactcatcagtgcatcagccttggcagcaagcaaatcctttgcaacagccaccgcaacgaggatatggagcttcgcatcagtatcagatacattcccaagctcctcatttccaacaagatgggttatcttttgactctcgtcccctgagcgcctccgaatcttcgtcatttccatcatttccctaccagcaaaattatttccatccacaaaacacacacatctcagtgccagacacatttcctgaagcacccgcgcagcagagaatacagccacggcaacagcaacaaccccagtcgtcaatttctgcatactctttacctcaaagctactcctcggaaatgctggtaagccgaccctaaatgcccttcgtggtgaccgtgactctaacttgaggcagcaaaacacaattgatttgaccaacgattactccgattcagacccgaatgtcaccatcaacccccagttcctaaattctatcccgcaggcattcaatccacagcagtcttcgttgacaaacaactttattcagggaattcctgcagacctcaaacaacaagggagcgaacagtaagttatcactttactttatggatgtttaaaatgcacttgctgatttttagaaggggtaggcaatttaattactaccagcatgatctttcagtccagtcgcatatggcactaaatggcaacccggtgattccacctggaggtatgtgtagaccagttgaaacccattgtgttagacttaatactgactttcataggattaccagtactgcaagttgtagtccccgataagaagggcgcttctaataagcagcaaacgaagaagacttctcaaaatggccgaatgagaactttatctaagtcagaaagtgaaagttcggatgaatccgatcttgagattgaagcacctgacgagccttctcctatccctccgatccgcccgactgagcccgaggctgcagcgcaatatgataccctccaagccgtgtggtcaccgaggaacaaatggcctggtcctgagaaggtcaagaatgcgctggtagcctacaaagagcttgtcaaaggattaagagatgcgtggaaggaacaagttcaggccatgaagctggctgaaaaccaagatgacaaccagaaagcaacacaacttaaggagaaagtcacttcgcaacgtcgtaccatggataaaattgcgaccacgacactggaaatgggtcatcccaatattgttgagaagtatgtatccctctcctctcccaacccctacatcttccctcccttccatctggctgtaatggccacagaaatcccgaagctgtttgagaaacctataaatattcttggaagcattggatatgaaagcactgtcacgggctagaataaaggctcatcgctctattcgccggtggcaaggcttgattatacatgcgtgtcctaagtacatatataagagtatcagatggagcaaaatggttccatcatatggattctcagatatgcccttcagaagctatctgtgaatctctttggggggaatctctcctatctagaaattggctcaaacttgcagctttgtgtgccaaaattcttgaaacgttatagttgagctcaaatgactgatcgttaatttcatgtaggctgggagagcatcctatggttgtggcggctttatattcgttcttactcgatcgtttccaagcagcagactttgctgggactctgactattaatttgctttcggtaagtttaacgtttgtctcctcttgtgtcaaatgcaatggctaacatggaataagctcttctcgcgtttctcgactttgacagaagacctgatgcaaaagaccaatctttccaaattgttgccaaagtttctcaaaaagggtggccagcaggttaaggacctcacacagaagatattggataatgctgcggcctctacgaagcgtaaacacgagagtgaaaagtccgccaaggaagactctcatccaaggagcgttttagcagatcagcctaaaggagaggctggagtgaagcgaccccgtgaggcggatagcaatctgcagcctggcacaaaacgaatggcagttaccaatcccttgaaggatgtgaataaacatgcacccgcaagcaatggaccggtcaaaggagcacaaagtagtaagccaaccggcgctgcagtgctgcgccctaaagccaatatcgtggcccctaagccaacaagtctctttggcactttaagttcggcgtccaagagacccgggaccacaaatgcggatagggctgctgccgccgccgcagcaaagccaacgtatgtacccacgaaggaactgtttccgaagttcatctgtactaacctttcaaatagtgctgcttccgaaaaggaaaagacaccagccccaaagccatctttctcatttggcgacattatggccgacttgaacaaacccaagcaggcaccaagccccaagcccgccgaagatcagcccccggagactgaagctgagcgcaaaaacaggttgcgtaaagaagagcgccgtaaacttcgcgtgacctggaagccggatgatgctcttaccgaagtccgactatttacccacgacccggatgaagaattaggtcccggcgatgggtcattgcgctcacgaggagacgttaaaggtgaaggtagtgttctcaagcttcacaaagatatggacgaattggaagaagaggatctcggtgagaccgtatttcaagacggttatactctttcaagtaagttattcttccaaatgcatcttaaattcttactgaccattatagtggtcgatttcgatttcgaggaatcaaatgatggcagtttcatcaagcgcggcggcactcagctgcccacgagtcccgagagggaggctcaggagcatcgggaatctactacccttatggtcttctatacctctcctgctgacatgcccgacacaccaaaggaaccaccagctcctgaccccgacgatattgttaccgatgtattgcctttcggagagttgcccgacctggtcaaggtatgctatacttctgataacactacgatccaatacttacaaagacactacaggtccgccaggaacgttactactcctacatgaatcccaagcctacgactccccaaccaacccaacaaccgcagcgacctactcccggagacagtggatttgacatctccaatttgctcaagatcatccagggtgttcctggacaggcgcaaccaatcccagccccgcaggcaactcaacccgggggcatgccggatctcgagaggaccatcagcatgttccgtcaacaacaacctcaaccacaggtccccccggctccaccagtaccaattccacagccgcaaggccttgacttcaacgcgatattgaatgttatgaaacaaatgcaggcgccgcctgcatattcccagccccagcaatcgcaatcagcaatggcacctaacctgggcgccatgttcgcacaattcggtgggcagaaccaaaacggtgctctcccattccgacagcaagggcatgactatgaagacccagagcgcaagcgcggccgcgagggcggttattatgacgacaattctaaccccgaatcgtggagccgctcgaaacgaaccaaatttggcgccaacgaggccaagcctgtaggtacactgcagcatttttttgataagcagttggctaattcttttgaaatagtataaggtgggactagttgcttgcagattttgggccgagggcaagtgtcgcaaaggcgacaactgcactttccgccacgatcctctctaaatcaacacatccttttcgactgatacccttgtactgccgttctctacattggcacaatctttttttctcatatctatgcattactacgttccttcatggtttctttactattttttactgggtcatggaaatgtattttacaactagaattctctggttggcgttcatcgcacggttgcgttccaattcatggtctgggatgtcagcacatattgattcgtcctctgattttcaaaatcctttgcatgcccccccccacaagctcaggcgttctctttttttttctttccacttgtttcgcctttgtttctcgcttcgcggatgcatttagcgagggggtccccagatctgggggctgatattatggcgcatggatggagggcgatgacgaacatgtacaattaggtaattttatttttttcttcacaggcaagaaccatcttcggcgcaatgtcttccatctctagaatggtccgcttggacatattccgaccgtaaaggtggcgttcctaggagggagcgaccccgaaccgtgggcgtttccccatattccctcactggtcgaaggcaactgcttttcctctgcaccacactattggcatttcttcgtgccttcctcgttcagaaggcactggatcggaaatgcttcggagggattcgcaatatcgaagtttttcactgaagatcttaaaacacttgatacaccaggtgtttttcaactggattctccgggaacgaattgtgggcgacatacttcagatccacggaggttatcaatatgtgggaaaggagaaaggatacctagggtctatatgcctcaggaaacaaagaaaatgcatagccacgcttgcaaagggaaggtaaagtacggagtacttggaaccaaatttttgctttctatatcgtgaaatactgccgatatctccccgattctttgttttatccttacacacggacgaggacatccttttgggaaggacgggaccaatatatggacgatgtgcttcgggcggttgagctcggtgctacgttcaactttggccaactggcacaggcaccggcctgtctgtccagtctaacccgcatgaagggccatgaccgcagttttcgactccgtttcgtagaacaactgctcgatattgccggtaccgcgaggcatctggactggacatatgcctgctctacttggccgtatacaggatgtgaatgcgttggtgtgtaccctgcattaccttgcccaggttatgagtgcgacggacgttacagacccttcagtggttgatatcggagtatgtattcggctctgaagcaatttgttgagagtgaagagatccgactatcttggagaaggtcaacgtgcctgatagtgtggaccggcagttgctttgaccacagcctcgctttgatgtatagttgacaacgatttagcaattctaccgaattttactattttacctttcaactttcaactttatagtacacgttggatcaaatcggacggtttgcggtctctatgatccaaggttgacgatgtaaggatatctagttggtttgtgatttttgagacattatatacaacatatcatcttttttggctatcttaacatgcctccggcgtccttaggccaaggcaaagaaaatattccgatggcttcagtccgcagacaagaaggagaactctttctgaggtggcgtgcggttgaccgcccttctcttcgcctcactatcgagggcacgaatttagaagctgaggttgttcagccatcctcaataattgtccatagttcactagcatcgtctatatgtcttgcattgtgataaacccgaatccattcgcttgatcagccaagatccaccagtatgaccgcaaatccagatgccaactttgctatatgcaaccaccttatcattgtctgctgccatgctatttacaccggaggcccaaagcttggggcctcagagagcgagtggttagtgtgaaatgatcttttatatgaaagataccatctaatgcactgaaggcttattgagcccttccagaagggagaaacacccacattcatcgatcatgtcaaagctggattgaaagctctagcagaagactctcatggcttgcttctattttccgggtaagggtttctcatcatatgcttttcaatttcttttcgttaatccattgcacagagggcctaccaagaagcctagaacagagctcagtgaaggtcaatcctacctggtaagaagcctgaattccgtacaaccgatcatccagaaagctcatatatagcaacattcagaacttggccaaggataacgattacttccgagacatgtccactatctccacaattgacccatcaagaatcatcgcagaaaccaacgccacggattcatatcaaaatcttttgttctctctaatacagttccggatacacacgggcatttatccacagagagtcacagtcgtgactcacgagtttaaacgcgctcgattcatgcagtgccacttcccagctgtgggactgattcctgttggcccggaacaaaaagactatatgcacaaagttgctgtgataggtatcaatccaccagtggaagttactccactagagactttaactcggggcgaggctatgaatgggatcgggctttggagagaagatctttacggagtgaacggggatctagtagggaaaagggcgagacgaggctggtcccctggaatagaaaacgatatattctctcatctgggactggaaaatgtggtgtcacatctaatccgctatgatgggcatgaccattgtaataattggttcccgaagcgagagagcctgccttggtcttatactaaacatgatacaaccaaggggccttgatgttgaccgaaacaaatatgcctctgacatagataagtggaaaaagtccttgatcctttcccgaaacgccaatccgtagtatccttcgtatttgatcataatgtgtacccgggagcttaatccgccagccggtagctgaccagagttccaactcggtgattgtttgtgctgaagctccttagttgaaccttctctgcgttcttaatttccttggcatcactgtcgccccattccaccggcacgtctgaatctgcgtcggcatagacaagtacattgaaggtgcagtcaccatcaaggacggggagaaaggtgacagatgcggtgatttggcggaagatggcttggatctcctcctgaatttgtttttctgtcttttcgataggttcgggggtttttgcgtctcttcaaagcgtaaagatgttagattagtgggatgatcaagatgacctcacggtcgacggacttaccccgatgtgctgttctctttgtcaccggctttctgtgagctcttgcttttcgaatttttgccgaagacttcgacctattccgtcacattatagttagccacgggcttggataagagagtgttgaatgcatacgtcgaattgccatctctccacatgttcgccggtctccttgctcgtgataactaccacaagcttcgagatctttcctccctgcatccattccttcaactgggacatgatcttcttgatgtaggctttgacctggtcgtcggccgaaactgctatgaagttagggctgtcgacgtcggctaagaagaacacggttcacgaaccgagcatattgaggccatattttttaatactattttcaattagcttgctgtattgtagtgggtaaagatggagggcatacttacgtcgtgaaatcctcgggaggatagactcctcgttggaagctgagcacccaatgcgatcagccagtgtcttggactgaaaacgtctgtaaacttacaggattgaattaatcgagtattcaaactgagcctgttagtactcagacatcattgacgtaatctaaaggacgactcacgaattcggagacaagcttggccgatcctgttatcttgtaagctttgtacaaccacgataactgcataagtagacgagaggtatggacctttgatcgacagcttgtgcacctttgactttcccttggtttccgacatgatgaactcgtagataggcagctgcggactctgaaggtgaaagaaagatagagccttgtttacgtcgaatggtcaccgcagcaataaacagtcaccgcccgcgcgtccgttttttctccgcaaatcgtgacaagtccaaccagcactcaagtgctgatcgattgccccacggataaacttcgattcgacgcttgcataccatcagcccctcctatgccaccgcagaagtcccaatgcgaggatgtctgcagttaggccgatggctgagcgcagcgccgagatgccaggccgcgagcctccgaccaccaactgtattttctttgtataggtttaaaaggagtttctctactaccacgatttactatggacgttcgaaaattgcgcatataaaactcgacgtaaacctcgagaagagaattgccgcgatcccaatcgaacgttttcgcaatttctgcatcgttgcacacgttgaccacggcaagagcacgctttccgaccgattactcgaattgacgggcacaattgaagcaggatcgaacaagcaagttttggacaaactcgatgtcgaacgagagcgaggaattacggtcaaagcacagacgtgtaccatgatctacaactataaaggcgaggattacttgctacatttggtcgatacacctggccatgtggacttccgtgccgaggtgtcgcgaagttatgccagttgcggtggagcaatcctcctcgttgacgccagtcagggcgttcaggcgcagacagtcgccaatttctacttggcctttgcgcaaggcctcgaattgattcccattctcaacaaggttgatctcccctcggcggacccagagcgggctctggagcagataagaaacacattcgagattgatacagaaaatgcggtgatggtttcggcaaagactggattaaacgttccggctgtgctaccgacggtagtggagaagatccctgcgtaggtttacccagtggcttcccaaagcgctatttattttgctaacttcatgctagacctatcggtgattctaagaaaccacttcgtatgctcctcgtggattcctggtacgactcctacaagggcgtgatcctcttggtccgtattttcgacggtgaggtgcgtgcaggtcagcagctcatctcctttgttaccggtctcaaatattttgttggtgaagtcgggatcatgtatccgaccgagaccgcacaaactgttctccgtgcaggccaggttgggtacatctacttcaaccccggcatgaagcggagtaaggaggccaagattggtgatactttcacaagagtcggttatgaaaagatcgtcgaacctttgcctggattcgaagagcccaaatcgatggtctttgtggccgtatacccagtgaatgcggatctcttcgagcacctagaggacagcatcaaccagctggttttgaatgatcgaagcatcacagtacagaaagagtcttcagaggccttaggtgccggtttccgtatgggatttttgggaacccttcactgctccgtgtttgaagaccgcctacgacaggagcacggcgccagtatcatcattacaccaccctccgtcccagtcaaggtcgtgtggaaaagtggcgccgaagagattatcaccaatcccgccaaattccccgatgatgatagtgtacgactcaaagtcgccgaggttcaagagccgtatgttttgtgcactctgacgttcccagaagagtacttggggaaagtgattgagctctgcgaagccaatcgcggtgagcaacaaagcattgagtatttcacatcgactcaggtcattatgaagtacgaagtgcctctagcccatttggttgatgatttctttggaaaactgaaaggaggtaccaagggctatgccagcctggactacgaagaatctgcatggcgagctggtgacattgtcaggctacaactcttggtcaacagggagccagtggacgccgtaacgcgaattatgcattcgagccaggtgaaccgacagggcagaatttgggtaaccaagttcaaggagcatgtcgaccgacaactttttgagatcatcatccaggctgctgtcggtaagaaaatcatcgctcgtgagactatcaagccttaccgaaaagacgtgctggcaaaattgcatgctagtgatgtaagtcggcgacgaaagctgctcgagaagcagaaagaaggccgcaagaggttgcgagcagttggaaatgtcgtgatcgagcacaaagctttccaggcattcttggcaaaataagcgtgtaaattagcatctaaatacattgtataacactatttctgagatattttctcttgtattaagacattatacaaacatgcgccactcatgacagcggtgagagctttaccggcagaaaaaaagttcatgtcaagacccccgccatataacttcttcctctactcattctcacttcactttattgtgtcaaaataacctcgctcgatatctgtggcttctaattgcatacataccacaaaatatcagagttaattcttcttcgagcctgaaatctggtctggcggctgacgtccgcatatgccgatcgcatcgctttgagtcaccctgccatgctccgcacttgacacggccatgcagcctccagagggtgcgcaggtagacctgggcaaggcccaggttattgacagcgttcctaaagtgatcaaggaactgaagtttggtgtcttgtacgcagttcattcacatgtgcttgtcacaagcgtttgtcgcagacttgatcgctaatgaatatttatgttccagaaccaatgatgatattgttgcccaagcagtggtggaagtttccgaccgaaagtttttcgacttggatcagacccgaacggtcgttgcgaatggacctctcgaccagcgcatgggtatctcgaacaaaaccgattcttgcgcaacatgtggaaacaacctcaaagactgcaatggtcattttggccatgtgagattggtcctgccatctttccacgtcggttatttcaagcgcgtcatttcgatccttcaggaaatttgcaaggaatgttcgaatattctgctccccgaggcagagcgccgtacctatcttcgcgatatgcgccgaccgggccttgataatctacgccggacgcagatagcaaagcgcatcaacgaacggtgtcggaaaacccgtaaatgtacatactgcggagcgatcaatggtgtcgtgaaaaagaccggaacaagtgctctgaagattacccacgacaagttccgtgcattcaacgtctcggtttccgtcaaaaaagaaacgccgatcagcaaggatgtctttgataactctttcctcgaggcgagaggcgcaaacccggaggtcgaaaagcacttcaaaaaggcgcaggatgatatgaacccccttcgcgttcttaagctattcaagaaaatgtccgactctgactgtgagttgattggcatgaatccaaaggaggctcgcccggaaatgttcctatggcaatttatcccagctccaccggtttgcattcggccttcagtaggacaagatggcgcatccacagaagatgacttgaccgccaagctaggtgacattgtgcagagcaatatcaatcttaaaaatgctctactcaagggcgctccagttcaaacaatcatggagtgctgggactacatgcagcttcaaattgctgtctacataaacagcgatgtgcctgggcttaacaaagccgatcttggaaaaccaatccggggcttcgttcaacgcttgaagggaaagcaaggtcgtttccgtggaaacctgtcaggaaaacgtgttgatttctctgggcgaactgtcatttcacccgatccaaatttgcgagtcgatgaggtcgctgttccggagctggtggcaaaggttatgacttatcctgaactagtgaccagatataacaaggaaaaactgcaacgacggatttgcaatggtagcaacaaatggcccggagcgaacttgatcgtcaagaaaggaaccggattcagacagatgttgaagtatagtaatactcagcgaatggctgatcagctgcaagaaggcgatgtggttgagcgtcatctcgaagacggcgacattgtgctgttcaatcgacagccttccctccacaagctcagtattctatctcatttcgccaaaatccgaccccataggactttccgattgaacgagtgtgtctgcaatccttataatgccgatttcgatggagatgagatgaaccttcatgtgccgcagaccgaagaagcccgagcagaagcgatggagctaatgggcgtgaagaacaatttggtcacccctaaaaatggagagcccatcatttctgccattcaggatttcattagtgccgcgtatgtgttgagcagcaaagacaacttctttgatcgtgcctccttcacgcagatctgtctctatatgctcggacctgaaacaagattcgatctcccaccaccatcaattttgaagccccagatgatgtggactggcaaacaagtctttaacattcttatgcgccccaacctatccgaccccgttatggttaacttagacgccgcatgccgtgagttcaagatgcccaaggatggtcgtcccaaggacttggaccccaatgatggctggttagttatccgcaactcggaagttatgtgtggtgtgatggacaagtctacaattggttctggaaagaaagacaatgttttctacattatgctcagagattatggcccaccggcagcagccgagggtatgaaccgtctatctaaactgtccgcccgatggttcaccaacatcggcttttcaattggtatcggagatgtctaccctagtgcaggactcgttcagtcgaaaaacgatcttgttgaggcagcgtactcgcagtgtgacgaagtcattgctaagtacaaggcgggcactctggagaagtatcctggatgcgacgaattgcaaaccatggagaaccagatctccggtattctcagtaaagtccgtcaacaagctggtgacgagtgtattatgcagttgagcaagtacaactcgcccctgatcatggccacttccgggtcgaagggttctagtatcaacgtgtcccaaatggttgctcttgtcggtcaacaaattatcggtggtcaacgtgtccaggacggcttccaggatcgtaccctaccgcatttcccaaagaatgcacgacagcccccgtcgaagggtttcgttcgaaacagtttcttctccgggctggagcctccagagttcattttccacgctatgtccggtcgtgaaggtctggtcgatacagctgtcaagactgccgagactggttacatgtctcgtcgtctgatgaaatccctcgaggatttgtcatcgatgtatgatgacacggtccgtaactcgtctgctgccatcgttcagttccagtatggtgacgataagttggatcccgtggatatggagggtaaagccaaacctgtccacttcgatcgaacatttattcactcagaatccactacgtacaacaacgacgagcgaagcttgttaccgatggaaatgatggaagtctgcgaacagatgctttcgaaggaacgtacgaagctagtccgcaaggacttgctcggcaatgacctggcatatatggatcgcagtgatcatggtatcgatcagttcgaaagtgcccgtgacttccttgactcgattcaggaatacgtgcaaaagagggccgacaaattgatctctcaaggcggcgatatcgacccgtccgatcagcagagccgtaagggcttggatcacacaggcaagctgacagataccacgttgagggctttcatcactgcctgtttgttgaaatacaagagagcccaggtcgagcccggtcacgctgtgggtgccgttggtgcccagtccattggtgagccaggaacgcaaatgaccttgaaaactttccatttcgctggtgtcgccggaatgagtatcacgcagggtgtacctcgtatcaaggaaatcatcaacgcctcaaaggagatcagtactcccgtcgtggcttgcgaattggtcaacaaagaaagcactatcgctgctcgtattgtgaaaggacgcattgaaaagaccttcctccgcgacgtcatccactctatcacggaggtttggtcccccgatgatgcctatttgaaggttgttctgaactggaaaacaatcgaggatctggcgctggagatcacgacgccacagatcgtcgaggcgattaaaaccaacaagcgcttcaagggaggcgatctcaagttctcgtgcaagcaagcctcaatcaaggtccacatggatctcgatccggccagcaaggcatctctttctaagacggagattgccgccacgagcgttgatcccttcctccgcctgaagcatttgaagcgtattcttcctaacatccaaatcctgggtcacccacgtgccacccgagctatcattcgcacggacgagacctcgaccacgaacactttgctcgtggaaggctacggattgagggagtgtatgactacgatgggtgtggacggtctccacaccaggaccaacaacatcatggaggcgcgagaggttctgggtattgaagctgcccgaagcacaatcgtcgtcgaaattagcgaagtcatgaaggacatggacattgatcctcgccacatgcagcttctggccgacgtgatgacctacaagggtgaagtgctcggtatcacgcgtttcggtctggctaagatgcgtgactcagtccttcagcttgcttcgttcgagaagactgccgatcacctcttcgacgccggtggtctcggtcgtaccgatctcatcgagggtgtgtcggaatgtatcatcatgggcaagacagtgtcactgggtacaggtgctatggaagttgtgcgtaagctaaacttctaccaaggccagattggcccacgaaagacggtatttgaagatgcttggaccgaacattgtgaagcgcctttggtaaggcgacccaagaggaaggtccgatgaagtggctgtgaccctgtgactctgtgacactgtgcattaatttcggcgttaagattttggccttttggacaaggcttgtacatgtacttatctgagcggatgaatttcattgacgatatgatcaatagttttcatttgtcctctttgactctacgtgagatgaactattagggctataagaagccgaatgtggagtactcctatatgaccaccccctccacaatgccccaggttcgaacctatcacaatattaaaaaacaaaagtcggggtgtgtacagacgtgaagctaatttccaatacgactgtagaaatatctagggacaagcttcttgggttatattcaaatattcaacctttttacacaaagtacaagaagttcacaacatccctcaacggaatgtctcggattctcaacctatcggtactccatccccaaatacccaaatatccggggatatcacaacgatttccttgtttttttttcaacggctgcagcaatccgaaaagagaacctctaggaatacgagattcgagacccttgggatcggagaaagggtcggggagccgtttatttggaataaaaagaaggcatcaaatcacccaagagagcacccatgtcccgagtgaccagggagtgcatcgtcctccaatcagcatcgtgaaacccctgaggcagccatgggggttaacctttggccatcacatcgcctcgacagttctttgttacccattgccttatccggccacgccacatccgtcagcactcggtgggttgaatgtttctttgtttgctgtgcagtggacggtctctcgaggaattgctttctaactacggcgtacttcgtactgaatatccgtgggtcgcacttaatctttcgcatctcccctcatctatctccccggcctccccgaaaacccccccgcggattcgcacttgggatgaacatggagtttggcaaccaaagaaccgctaggaagcgcgagatccgaacccgagccccgacggcctgtcagacctgtcggctgcggaagactcgatgtgacaataccaggccgacctgtagctactgcgccgtgcaggggatggagtgcaactatcccgaaacatcgccacatcagaaccagtaagataacatgatcgtgtggagaggacaacacactaaacattagccttgttcttagggttggatttgattcggggaacccatcgaacaatgaggtgctccagcgactgaatcatatcgccggtttgctagagaatatcaaatccgaaggctccaccagctcgactcgctcactcaaggaaggattctttgagttggccatgcagaatactagccccatagctgattcattgccggggagcaatccatctagcaccagcaccgctagtatcgatgaccggggagctgataatgatccccgagtcctttacatggctagctccggggagaatatgctccgatggcctattttcaacaaggtcatcaccgaagccgagaaacatatccgatcttttctactcgactcgctggataaccagccccgcagtatgcaggcaccccggcaggtggggattggaagctttgtcgatgagatcccaagactttgcaggaagtactttctactatgccaccgacgaaacccgatagtcgatctggacagtctagaccgttatgccaaggaggtcaccgtccagggtctgggatgggatggcccctcgtgtcaagtggtatgtcaactctcctttggaagtcccacttgaactaagtcatttctgtagctgttagcgtgtgccttggcttcgtgcacgtcatcgaagtttgttcccctagcggatgatatgccagcgaatctcgatgcacttcaagcaccacccatgtcagacgccaatctcgatttggctgagacatatttccacgcggcaaagcagagattcggcttcctgcacacgtccccaacagacatccagtgttttcttcttgctggaagctaccacagacatgccatacgacctctgcaggcttggttctgttatcagcaggcatcttgcagattagaagttcgtttgcggtcgctgtgtagagagcagtggactgctgatgacaattaccataatctggaatcgagactatattggtcttgtatccaagcggaacagtgggtttttcttaccagactcttatatgatcatcaactaagtatcgtcgacagtgagatgcagagcgagctccctctctggagcagtggtcttgaaagcctgggctattcagatccattccctaaattctctcgcagatcttcttcctcatatgatgaaatggatgaagaccaagattttgcagtcaagccaggctttgagctggatggcaccgaagaagagaaaggctggaaattctacatcgggtccatctgtaaccgccgaaccactaatgacatagtgtctgacatgtggtgtcaaggagagaagggctggaccaaagatattcccggtcttctaagaaagacaatggacgcggagcgtgtagtaacatcatggtacgaccaagtcttcgaatatggcaatgaaaggacccctactggccttgctaactctttcaaaaggtaccaaatctcggtatccgggatccagtcccaaaaagacaatccagatctgaggttcttcttccgtggccggtaccacatggcattagagaggatctaccgaccagcgttctacctcgcgatgcacttccaggggatgccagcgtttatcaggaagaacaacgcaatgtgggcagaagtgttccatctggcccaaaaagccattgacaactgcgtcaccctaataccaagctactggtatcaattccgccacgagtggatctggaatgtagtgcgcgccagcttcgcctgtgctgtgcacatcctcggggctgtcttatatcagcttgaagcatctcgggatcctagtacgtggcaggtacgtttaccgtcgaattggactgctttggtgaggttgtcgattcgaacgctgaagcattggtcgtcggagtctactgatctagaggtcatggcgtcgacccttgagaggatgtatcagggtacttgtcggttggctaatgtgcgcccggatcttcatctgctttaattgttaatatggaagggatattggatattgggaaagggatatacatatagggctttgtgaacgaactcttgcgtccacataattatgagatactatgcattgatgatttcgattatttaattatgaactgcttctgcttcaatcggtttattagcatgtcaacatacattatgtagttattcaatcctcctagttctgtatacaactggttatactccgacatccgccccaccacaactttttcctcttcacttcatccctttccaccttcaacctctccagctctctccaaccctctcgaaatggaagaatacaaacccccagctctcccctcccccttcaacaataccatcccaccaccaatcctcctcacccaaggcgccgaagcccatctctacaaaactacctccctcgacccctccatccccgccgcgctcaagatccgcccatcaaaaccctaccggcacccaatcctagaccgtcgacttacccgccaacggataatttccgaagcgcgatgcctcgcgaaactcatacgggagggcgtgagcgtcccagcactcctagccctggactgggagggacatggcggccccgaaggcgggtggggcggcgcctggctaatgatggagtggattgacggtcctgtggtgcgggtagttctcgagcagtgggaagcatggatgaagcagaacgagggctcgctggatgagtcacagattgaaaacgaagaggcgcgtgtgcgcggcttgctgaggaaaatgggctcggccatcggtgtcctgcacaaggccggtattgtgcacggagacttgaccacgagtaacctcatgctgcgtccatctgcggacgcaggtgatgcggttgagggcactggagcgccctctttggagggggatgtcgtgctgattgattttggtcttgcgtcgcatagcaatcaggatgaggaccgggcggtggatttgtatgttttggagcgggctattgggagcacgcatccgcgctcggagcctttgttcgaggcgctgattacgggttaccgggatagctacaagggggcttcttccgcgctgaagaagcttgaggatgtgcgcttgagagggcggaagaggagcatgcttggttaagcctctcgtttgattttagggatgggatgcaatctccccccaactgctatgatcgatttagaagcaaaaaagaaacgccacgcttgtcacgacagatatctttattgacgaaagaaaaaagcattcatgaccggtctttgagacacgtgccgacatgagccgacgcgaaataccccttgttctcgactactccgcgatccttgatgactgccgtgtatttaaccacccattgtggctcgacatctccctggatgccgtcgttggcctcgggagaggaagccaagattcccgcaccactcttctcggtgggacccagcagttcccgcgtcgtgccgacaggaagaatatcatggcagtcgttatgggtgaggagttgaatgtgctcttgtttcgcatagagaatcaaatgtttaggaacgacacagcaatccttaagattgatctgatcgaccgatggcttgaccttggtgtgcggcaggaaccgggccaagcgttcgctgccgaactcagcaacgcccagctgggcgatcacgccctgctcgtgcagcgactctagcacgtgccatgtctgcaccatactgtcgaagtcgtccggttcaccgttgctcagctcgctgtcttcttcttcgctgtcgtcgtctgcgtcgaacaggatccccgggaatgagacgatcagtagatcgatagacttgacatgtagctccttcaataccagatcaattgcctctctggtgtgtgcgcaccgccttgataccgggatccccggtaggtagaatagtttcactgtgatatcatattggtcacggtcctctgacaggcctggctgtgagaagtcgatctcggggatatagaggccgtcctcggtttgtagcgcccatgaacgtggatgcgacacggattgaccatttgtgtcggtgccgttggccggtgacgtttcggtttgttgcgaggcgaggaagttcgatcgaagcgagttgattagctcaacgtttgatttctgcgtcagaggctggcgaatgacggattgccgcccagcttgcataatattcctatgagggttgagtgactgtgaccgaggcgcatcgaatgacaccacttacgaactagatagaatcagattcatgatggacgaacgagcgagatcttagatatagaagaagtattggaatctaatcatgagtgaaggaggatgaagatggtccgaaagttgaaagttgcaaattcaccccgcggagagcccctctcctacgggcctgacaaatccaacgttctccaaggttcctctactctacacttcacccatctaatctgcaattacttcaatccttgtcaacagtcggatcccagtccgtgggagaatactctcccgtatcaagcaatttcatatcctcagcctccaactcaaagtcaaagacatcgacattctcgcgaatgcgactcggcgtaacagacttggccagaggcacaaatccctgacaccagaaccattagcatcctgattctacatcatttactctctaggaaatcaatcctacttaccatctgcaaactccaccgaatcaaaacctgcgccggcgtcttcccatacttcttcccgatagacagcaacacaggctccttcaagcgactcccatgcgcaagaggcgagtacgcctcaacaacaatattcctcttcttcaaccactccacgatatccgaatgatccaaccacggatgcagctcatactgaccgacatcgatctggctagccccgctactctggatgtgcgcctccagttcgtcgaggtggtggataccgaagttagatacaccgatagatctcactttgcctgctccttgggcttcgactagtgcatcccaggaacccagacgggcttttttgccgccgtatggagcatggattagaatactgtatatgcaccggttagactgtagattccaattccatggggaatatccgtttctggattgtcgtggaggcttacaggtcaaagtagtcctgtgctgcttcttttaggctcgaatcaatggctcgcttggtagactcgtaccccattgattgcggcgggatcttggtcgtgaagaagacctgcgatcgatccagtttcgaattcagaattgcctttccgcaaggcccctcgttgtggtacatgatcgccgaatcgacctggaatctctttagtacggtcttcttgcgatcttcccggggagcgtacatggcggaatccagctttcagggcttcgagggtaaccttcgcggtctcggatgagggactatcgttggttaggagattcaggaggaagcattggttcaaacgtacatcatatagacctatattcatacaatgtcagctctgcttttgaaactcatctgtgtttgcggggtaactgactccgtatcctaagactgggatcccatgtcccgactgtagttgacgcgttgactggagagtcagctttgccatattgttgttaaattggatattcagaagacacaattcaacgttgtttgaagaggaacgatgaaatcatagagtagtcggtcatatatgccgcctatatctttaatgacgtatgacttcaataaccggattatctgtatctataagggacgattgatgtaagataacactctgatgtctttctaaatgtcatttttgtgattttttctctttacgttataaattctagaacggaggagactctaatagtaagaacaggtttattacatccaatgggctgtgcagcgcctcaccgaggttatatgaggcctacattcctcatacttttagccctaattccgacaatatctccaatcccagtcataagttgtagtgtaaagctctcaactcatattcacaagattacctattctggttagtactatgttggtctacaagcatcatccctgtcataatctgcccgctcttctacctccccccttccttcacgttagcttcccaatttccccgacgtccgacttctgacgtgttgccactgtcttcaatatgccaagcccggaaatagaggaatctgctcaagtcctagaatgtgaaccccagatgaacattcttttctcggctcccgacttcaccgtgccttccccggacaaggtcgatgaaatagtcaaccccgacaacattatctttaactagggcggcgtgaggatagccagaatatcacccgaaattgtcgtcgaattcggaacccatgtcacgttgaccgaggcgaaaaacatgatgtttgtgaaacaaaatacagaaacactaccagtgccggaaatcttcgcttgctacacttatggcccgatagaccgagatatcggagactacggtagcctatttgatacacatcttcatgactttcgtggaaggccagagtctcgataaagtttgggaatcttatgatgagaacacaaaagcccatgttaccaaccagctcaagcaatatatctgcgaacttcgcaatatcgacggcaactacataggctcgactgattccggccccattatggatccgatctttgagacttaccacgacaaaggttagcagcgactacaccaacatatatacgtgtgctaatacacatgtccaggaccctttaactccgaagaagcttttaataacgcaatcgtcgatgcctatcaatccaaggcaccaagatgtcacatcaagagtttcctatccggtatgttatgccaaaacaaacaccagatcaaattcatccacggagacctacgcctccagaataccatagtcaacgatggatctgtcagtgggattgtggattgggaatttagtggcttgtatcctgaatactgggaattttccaaagctctccatgtctagaggtggcaaaatgattggattgactacctagtacagattcttcgaccctattatgctgaatatgcggttcattcttttttgactcaaacattgtggtgatccaaattcttgggcagactacgtacggagtacggagtagcagtatccattcagaccaaaaagaacatttgcacttgctataatgttttgataaaagcaaaaacatgtattaaatgtcatgcatcacatgaacatttctaaaatccaacaacctctctatgtatgcagatacaaatcttcaaaccagccaactagttctttatttgcagctccttctgagcctctgcctccacttgttcttgcaacttacggtccgcctcgcgcttaagctggtcaggacgacgaagagcaatgtccttaggacggaagtcactgaacaggtgcttgagaacgttctcaatcaaccagcagccaccgtagtcgaagatcatcagcacggtcagagtcaccttgaactcattggtgaaggggacaaggcgcagcttctcattcagctcaggaatgaattcggtggcgcacgagaatgcaacacccgaggcggcgatgaggccccagtacatgcccttgttctcgcggattgactcgcggaaaggacggccttggtagttgatcgagaaagtggagatttgctggatcaactgcaaaaggtagatggcactgttcaggagggaaggctcgaactcgccctcgagatcaatattggaatctctcctatcggttgtgttagctatgaggtgggacaaatcagagggaggttcaacgtacggctcgtgcttatagacatagttggagaggtagatcagagtcacgatgtggatggcaaactgtccaagaacagatccaataatgtagacgttgaagatattcggctgcgggcgctccttagacagaccctcgacagacttcacattaaaacattagcaaagcaatttgtgaacgcggagaagtatgacataccttggcgcgggaaatagaaaggaagcagacactcatcagcataccgctgatggtgacctgtccatcaccgaacttaataccctccaagtagatgacactcagactgtacgcactgatcaagcagttcaaagcaagaatcttgtacatctgaatagtcgcaaccagggtgcaacgaccttgacgaaggatattcgggatagcaatgacgttggccaacttgctggtgaagggagcagcgactgatgcatcacccaacttgatagtcggaggttcgctttcatccagctcctgttccatcaaagaagacgtaagcttgtctgcaagtccagctgcggcggcctgagccttctgctgtttctgctgctggggggtcaagttcgatagctgcaaggcctgagcgccaggagatgtgatggttgggatagcctcgggggttccaccagcagcggtgatcgcggcacccttgcgctgcgactcccgctccatggctttctcgtagttagggttggaaggaccagggggatacaggtgagcgatttgaacagggactggaggggcaggctggttgaatctttgcatcatgctgacctgcttctcgtacagctccttcatcttagtggtccgatagtgttcagcgatcttagttaaatcgtctggcgagccgttcagaagcgcgacaccgacgtgagcctgcttcagagcgccaacatcgttggtgccatcaccgcacatcagagtggtgtatccagcgtccttaagaccaagaaggatgtcttccttttgcttaggagacacacgagcataaacccaggtgtgacggagcagaacaggtagagcctgctggcccttgaactttgcgagagcatatccagtgatacagatgtccttagtcttcaggatctccgggtcgaggggcttagtggggtcgacgtcgatattgagcttatcatcaatggtgcgccagacaatcctggttccagagttgtcatgctcgggggcatcaaggatgagaacctcgcgatcaacaatctcaaccttgcgggcgacatggacagcagtcaatgggttatcaccagtgatcataacaacacggtggctgctctcatttagcatacggacagatttaatggcatcatccttcaagggacattgaaggacaaggaaaccggcaaaaattagctcggattcgatctcttcgcgaacgtagttgttcacgcggccctgggaaagttcagattcagatgaaagatacttgtaggcaagagccagcacacgggcaccattgcgggtgaagtgcttgtaggtttcctcgtagttgggaggtgtgttgaccagcatagtgttaatagtctctggggcacccttgacacccacgaatgtggacttgatcttcttggaagtcttgcggtcattggtcgtaatggtcgcgatggtgctctggcgtttcagaaccgaggagaactggaatcttctcttgatttgaacagattcaacgttgcgaccggcaacaacgggggtgttgcccttggaagacagagtatcgttgtttcccagagtccagccaagccattccaatgtagccttttccatagggtcaccgacgacctcaccctcatccagcttcaccaatgcgtgagcactggcgagaacgagagtggtgttgggtccagcagcagagggattggccaattcagtctgagcaccatcagcttcaaccttcgaaccagcctcacctaaaccgagtccagcaataccatcaacgacaaggtcctctccagtcagggtaccggtcttgtcaaagcaagcgatgtcaacacgaccagcgaaagggatacggaaaggctcggtgcagaaaatggcatacttgctcaaagcagcaagactagtgtttacggccaagctcaattccataggcaattcgggaggaacaacactagtgatgatgaggacacagtcgagcagaagcttggagcgtttgcggtcctggatcacaccctcttgccacacgtaccacgaagcggcaattgcgaaaatcaggaggaagaggatgaacaacagagcttcaacattgttggcagagacacgttcagttgagtagatcatggttcggacgaggctaccctggctagtttcaaaaccggtcttaacaaccacacccaaagcaccattgtctgggggcatggtaacgttgttggacaagttcttcaagtccgagtcggcagtgagattagggtgagtaacttgaaggaccttggtacctccatgcacaaacgagagcttatccaatccttccggctcaatcaagtcaccgccaggacggagctggacagagtctttcagcagaggtgtgctctcgccagaaagcatagcctcgtttacaatgacactgccttcgaccagaagaatatcacacgcaacaccgctgtcctccttggtgcggttcactgacatgaggtcaccgggaagaagcttatcactagtgatctcttgccatttccgttcacgatacacccagacatcgtaaggcttaatgctcattccacggaactcgctcaaggtcctctggcgctgccacacaaccgtactctcaaacataacgagcatgaaaagcgtgaagagcgagtagtaccaatattcatccaacatccacaatccaacacagaaaatctggaagacgaagaacggcgcgacagcatgctcctggaagagttcaaggaaaccgggaaccgggatatcaaaggtgttatcgccatagtggttgtagacgcggtcaatctcggccttcgacgtgaagccctcgctcagctggaaagtctcgagggcgggctttggttcggcgtcaaggacataagacaagggtgcgaaggtgcgagtctcagggtaaaagagaaagcggcgcttctggaagaggaacgaaagtgtcttcttcgtgccggtgttctcattaatcaatttgcagatctcggcagagccagcgttagtgatgggaaccactttgataagccgggcagtatcgatggacttggctcgaatggtagtgaatagagtgttgatatcaatgttccacttggtcatcaaccaaaagagcgactggattgtgatgatagaccccgcgaacacgaaggtccattcctgtccctgaatgtatgtatcataacgctcgggggagaggtagaaggcgaagaacacgggccagatgattatgaaaggccagacgtatgtgtgtaattgccaagggatcgggttatgcaacgaagcagtatggatctgaggatcgtccacgagctttgccctgtatactgttagctgtagccgcaaagaatcggagggagcttctggtaacgtacatggtggcaatctagtgaccgcggtcagagtctaacaagctgaaaattaaagactcatacgaattccgaaagcaatgatagtatccaatcgaggaaatgcccagatttgttgatgaagccaccttccaccttacaatttttggttccagaggattcgccgctcgacgcgctatcattatgtcagcctgccccgaccgccataggcttatgtagcactttaccgctgctttctacaacagcccggccgggctagctcaatcggtagagcgtaagactcttaatcataaggctgcgggttcgacccccgcgttcggctattcctaaaaccaaacctgagatttctttttttgatcttttcatttgctcgtcgttattagtatgttaatatgtagggagtacaacgtatgaattttttttttgagggagggaatgtggaagatgatgtctgaatatagactttgtgaaaacgtatatgcttgcatcaagacatattaagggatcaacctcaatctaatatagagtacataatgtcccactgtcgttctctgcttcagtgtttagcatgtcgatatatataactcgttttgggcctttctagcttgctccatccgccttcttgtccatcacctcccgattcaactccttcaccattcccgtcaacattctaacctgttctttcagctccctgagttcatatgtacaattatcaagcttgatatccggcatggactccatgacctgctctttccaagtatcatcaagatcaaagttgacatctgtggccacatgctcccattcctgggcatattcatcgtctgcttcgccatggcgtcgattccattgaatctggcgtgcccgactggtctcaacccaggccgcaaagataagcagaggagaatagatcacacccattacaaattcattcagctttgcgtatgcgttccgcgaaagccaccattcgaatggggctattagaaacagaatctcaatgagattgaatgctagtatccagattaagttagccacacgtgtgccatcgaagcggaaaaaatacgtacgcgggatgaagacattttcatctggggcgcggatgaactgcatggttttctgcgcaaagatggccatgtattcgtcagtggcattgcccgagatatcttcatatgcgctgttgtacaaggcaatgagaatattcaacaaaactgataattgtcaacataagcccaaacaagctggacgcaaacttaccagtcatgacaatgaagttgaaaacataatagaggatgatgccaaagggaaatgcaaactcctggaaagtgtcgaactcaggactctgcatgatactgttcaccattccttggagaatgtttcggtgaaggggatagtcgtcatccacttgggccatgccgacgaaggcctggaagaaaccagccatcaccacaaatagaagagcaaagaatatcaagctctccttcatcatgacccggaggaccacaaacatagcaccgaagaagcggaccgagtcaaggtatagcatcatgcgcatccagaacatagggcccgcaaatgccaagaagttgtagctgagctcgttgtatagccgcctttgttcatcgttggcagatgttgagtgtgccaaggcaataaaccgcatggcaagtgacacgatcaggatagtgtagagggttgagttgaaggcattccagaattcgaggtaattccatccaaccttccaaaacttgagcccttcgtcgcagatgaacgcaacagtcataccgtaaagaatgccctcggccacgtccacgtcaccggttgggttcacggtattgatgaccgccgtataaaccgcaaggtaaaccaaggaaaacaaaatttggcagacattctgatacagaggagttcgcatccggtcaggatggaaatgaacccaatagttagtgttagccttctcgctgtattcgacaaagttagttgggttgccctcttcctgacagatccaacccctccacaggtacaggatacatctctggtacggggcagagctgatgattttcaaggcgtggagatctaccgatcgttcaatgacattggcgggatcagtctctactccttcactgaagatggagtaccgcttgagcaagatatccttcagcacgtaatcttggtccggctccgattcgattctgttcaaagtagtgagtaaataccagaaacccaaaaatatcaaagggatattacatgcgcttggcgatgacctcgcaagccactgcccgaacctcgtgaagatcggaatcccagagctcgacggaggcttgaatcttgaaccatcgcagacaaactaaaagacaataaacaacgcatgctttgtattcatctcccccagccttcatggctgtcgcaaccacatcgtccgtgatgatgcggctatttgggtcggtcaagaatttatccttcacttcgcatgagacaacctgctcaatttgatatttcaaccgaagagcaaccttggcaagttcctttgaagcaccagaggcgtgaggctcatcagcagcataggcaggtagcactgtgacttgttagcacattgcggtgccgattgtttagaaatgacgtacgtcgacgacgttccacctggatgcgatgccgcgtcctgccaggatcggcggtaaagagattcctccaatgtcccatatcgcgtagaatatgcaaaaataaatggccacaacaagagtgcaaagactagaaaggggagagttcggctcacggagtttctagcttgaggggccaccaatgatgatcggcggtagataaacttcagctccccgccaagtaatgggcactgggtctgaattcgtaaggaggcgaatgtatctctatatgttggtgaatatgtgtctttacaggtacaggggtacgaattgcatttaaaagcatgactggcattgaacgtctcggttgcatcgcaaacattatgtgcattagaacttgcaccctgttgtgcgaatccagcgtctttgacagacggtgggcacgagggtttcgaccgcaattggcatgcagcgcatgcacaggcgtggataaatcatccccagacccgaagttcaggcgactgcactggctaaagggcgagttctgactgtaatcctgcccattagcacattgagccatcgagcctttctccgatatgtgcaagcttttttctatccattttcgccaaactcccctctagcggcgatctccgctttgtattccagcgcatgaccgccgtatgcccctcgactcggagttatgacccataacttactcaggaacaccctcatcactttcagagtcttcatctccgctgacctgggtgttctcacgctcacgcttctccataagctcctgcaggatcgcatcgtcgtgctcagtgacagccttgggtgccatcttcacggtgcagctaccgccgttcgccttgatacgctcttcgattttcacaatagccgcctcgagcaacttaacgccgagggtcttgtcgagacattggctggccaggacgtagagaggaggagccaccagtctgaccttgatctggttctcgggggtgttgtcggcctcagcggtacggagggcatccttgacggcatcgattccatcgtagccgaagcaggtaacctcgatatcggcacggaccttggtaggatggggggtcagcttgctgctgatgtattgctgcagctcgctcttgacggcatcgctagggaaggtgatctcatcccagacgttggggttcctgaaaacaattgtcagaatttgatcatatcacgagacaaaaagcacgaaaacctacgtaatggagatcttgaaagcatcgtgcgcatgtccgtatttctggttcaaaggccacccgatgttctcgtatagggtctcgaggggggtctgggtcgcctcagcaacgtggcgcatgatagagtgcactgccttgctcttgttgtaacgttcctcgcacttgataacatcctcgggggagacacgtcgcttcgacagatcaatgtaacctttaagttgacaagttagttctcaggttcttcgaggcaaataatgtatccttgcctttctccttgtcgacacgaagcacgatgacgacctcgttgcgcccaatgcggatgagcttttggatactgcgaatacgtctgcgggagagttctgagaggaggatcatgccatcgatgttgtcgtattcaagcagcttcacgtatgcgcccatctcggcgatctagctcgttcacacaaatagtcagtccctgtcgctttgatctcttaggccattattcagtttattcatacctgcttgacattcaccatgacaaagctgtccacctccgggtacttgtcctcatagaaccgacaatttgttaaagacatcttggcggggttctgtttttttttcctcggggaaatcttaggtgcgaacaagacggatttgacggcacaatcgagagatcgatctagtggccaacagtatatgcgtgatcgtgaagtcggagatacaggagcgcagaagagagaggtaacgcgaatgaggcacaatctatctctttgtggcggacttcaaaacccacattgacctgatcggtcacgggactaaaaggcacgtggttatgtaattatctcaccgccttctgcacttggaagatttggtcctccgtatggtgctatgctcggtttatatcgtaaattgggtaactatttggctattgaaaagaaaaagcatcagcccaacaccagcctagcgatccttgtgcgcaatgctcatgctggttttctggttgctgtctagcttgcttataatttcccgcttcttttcttcatcaatctttttgggacgcttcttggtcttcatcttcccctgcccttggtgtggaactagtgactgagttgtttgaaggcttccttttggttcatcttgctgaacttgttcatataccgcagttggacgtcgggcttgtattcgcggttcaacacgccggctatataacgtactccctgctggtcacagcttactcctcacttcatcttctctgtcgattttcaaaatgatagtatcaatttgttcgattgcacggtttatgatagagtttacacggagtttttctcttccccgtggtgctttcggcttcgcttgcatgaatgcaagtgacaccactggtgaggtggcagttcgtgtataaactaaccagcccagccagttccagtggtgaatggtatcatcctcattgcaaattgcagcgcggtacttgaattcatcaagctctggtaggggactggctagctgtaaagtttgaactggctccgaggtctaggtggaatttgggacgctgacatgcgatgtgataaggtagaaaggtggtaccacatttaataatatataaatatacctgcagaagcataggcgtcaaattgttataagagaaacccgtatacagttcgtcacaagttatatagagtgaatatatcacctgaccatatctcttggctgacacatcagtcaattgcgtcaacggaaatcaagggcaagatgggcacattcggcactcgatgtccggcactcgatggcatccgacatttctacgaatcagggagtttcttttgattatgctgaccatgccttttcccttcattgcacagtcattctccgaggatctgcgttgaattaacgataacagtcctcgggttgctttccccgcttatcggttccttagcgccgttggcccttgccttaccgacacaaacagttcgggctggtcccaatttcgaattgccttagtctttgatctctatgaccagcatttatggcgggctgtttcgtgcttaactcttaaagataaaacacctctttccagatcatgtctgagacaggttcattactccctggggagtctgacggactcggacgtccgactctacgagaccgcattgtcgacgctttccgttcgtcacctccaaccggtcttgggatctcgacaaattcaagccatgataataacacggcacatgatagccaaactggtaccggggctccgagcgaaccagacgtgagaactcgacttctcgaatcatacctccagcccgatcctgtgtgcggcgaaaggcgctgcagccatggcacgttctcgccgcggatagaagatacaggaagagactcatacatcggggggccgggcgcatttggatataacggacatgaattggcggacggcgcggccggtcgccctagaggtatagtagatcacgagtcggtctcagattcagagactccacagttgaaatcatcgttcacttttccaataaacgagacgaataaacagtaggtcgtatcttactcttatactgcgagcactttcgtagcctgcctcaagattggtaactgacgaatcgatgacagatacatatcctattatattccttttttcaattggattggacaatatcattggtcattcctgcgcggagatctcatggctgcgttgaccgtggcatccatctacatcccgatggccctctctttggcctccaatcttgcacacgcaccacccatcagcggcctctactctttcgtgatccaccccttgatttatgccatcttgggaagctgccctctcttggtagttgggccggaggccgcaggttccttgctaacgggtgctattgtcaaagcaagtgtcatgcaaggaagctcgggcgaggacgaccctacagaaatcgctcttgttgtaggagtggccactgccttgtccggcgccatgatactcattgccggactgacccgcctaggattcttggacaatgtgctcagtcgaccattcttgaggggtttcatcactgccatcggctttgtgatttttgtggaccagcttatcccagaattgggtctggccgagcttgccaaagaaacccgtgttagccatggcactagtgttgaaaaactgattttcatctttcgatacgctcgagagtgccatggactaactgccatcgtttcgatcgtcagcttttctgtcatcatggtgttcaggtgcgtaccgtatccccgggtttatattcaccatactgatcctccgcagaactttgaaaaagatgcttgtgcctcgtattccccaagtgatttatttcccagaccgcttcctggttgttgccctgtcagcagttctggcttggcacctcgactgggaatctaaagggctcgaaattcttggacctacagaagtcggctctggaggactattcgctttcacttggcctttccagcttgcatatatgaagcatgtgcgcacagcattgagcaaatcctttattatcgcgctccttggcttctttgagtcatctgttgcggccaagggcctgggcggaggcagttctgatggtatcaagggaatgcacataagtgccaatcgtgagatggttgcactaggcgctgccaatgtcatcggaggctgtttctcggctttgcctgcttttggcggatacgggcgaagcaagcttagctcgcagacaggagcacggtcacctatgactagtgtttttctcagtatcatcacattcacatgtgtcatggtgcttttgccttatctctactacctcccggttcgtccctctcaaatatataccacacgtgtgcttttccaagtgctgaccacatgattttccaatagaaagcagtcctgtgctccatgatctccgtggtagccttcactcttgtggaagaatgcccgcatgacctaatcttcttcttccgcctgcggggctggtcagagcttgttctcatgttcctcatcttcacaacaacaatattctactccttagaactaggtatggcgatgggaatgggcctgtcagtgctaatcctcattcgacatgcaaccgccccccgcatccagatcctgggcaaggtcctcggcggcacaaccgcgcgtttcgacaacgccgagctccacccggaaaacgtggagctaatcgaaggcgccttgatcgtcaagatccccgagcccctgacctttgccaacacaggtgatctcaagaaccgtttgcgacgtctagaactctacggctctactcatgctcacccttccctgccgcgcatgcgtgctccggaacacaataaaaatatcattttcgatgttcatggcgttacgagtatcgacgggtccggtacacaggttctttcggaaatcgtacaagcgtacacagagcaacgcgtcagggtattcttctcccgtttgcccaataggagtgtgttccgcatgtttgagctgagtgggattgttgagacatgtggtggattgagtcatttcgtccctagtgttgatgaggcgctgcggttggcggaatctgagaaccagacacaggagatatagtgtgtctaccttgctggaattggtgacatgtgtttgggtacagtttggatatattgtacagacatattgctctcgatcatctaaaatataattaaactgttatactacttgacattttgtcaaggtgcaagttcaacacctatccatgagcaattacttattttccaataacgagccttgcttttcttgggtttaatgggaattgaaataaacccttcatgctttggtatgcaccatgatcaggagacctgatcgtgccattctggcgatgaaagcctcaattgcagcatccgcagtacgtatcagggtgatgaaccactaggtcaaaacatgactagcagctgcaatttagccgccccggtttgcacttagttgcaagtggtgtattggcgatgagtccagcggattgaattgaatagcttcaagaacaaagctattagcaccgtgaatccaggcagggcatactggtcggttcgcactcgcttcttccgagctcgaaagatattataacatgtcccagtttcacactggcacagaaaaacacccagaggctcacgtagccgaatgatcctccacaacagccttccggatcacctcgagcagaagcgcttccgccgcccccgaaacaagttcattactgccgccttgaactcgagcgccctcatctccatccccatcctcatccccggcatccctatcagcagccacaaccagtttcacacgtccttcgccacccaaaacgaaagcagcacatgcaaccttcgatagtcgcacatgctgcttagcaacctggtccgaagacgacccatccagatccagcttcatggcaagatgcgtctccaggtacgaagtaagattggcgatgagaggactgcgcagtttatgctgaaggcgtgattccggcgccgactgtccagactgatcgcgcaggaagtccgctagtgaagcgcgcgtgatgctgacattgagggatctcagcgccggtgcgatagacggtgaaaaggagagcgtgagctgtaactctttgataatatcttcgactgtgtcgcttgtacttgtccgttgagtgcgcagggtgtcaacgtatttctccagacccgcgcagataaagctcgacggcagtcggagtggcgagcagtaggtatcgaaattggtagataggaaggtgaggaatgtttgccggagcgcagttgggaatcgggttaggaggagagggagagatgtggatcccgtgcgctgcgttggtggtgattttgtgtctgcgagcaaagctgctttgtagatgatgttttcatattctagtgttactagaatcccaggaaatgtgatactctgtgatctgcttggcgcttcgtcgcgcgatggttgagaagagattggccgccatagacaattttttagggcgcctgttttggaaaacgcgtcgtcgtctgctgcaccagtgcttgtatgaacaccagcgaggacatcgcctgtgagatggtctcgtagacgcgttgcatatgtttctaacgcgacctggttgtctaggagggctttatagtccttcccatgatggagaggggagagccggtggatggtccaagaagtgttgaacaactgtcgtttgtctgcttgttccatggcagccaacgcacgggtttgcaataaactcggctaattattatgctacaattgaagcatatcgtcgtcgaggaagattgatatttggatgtacagtgacgcgtgccggtgcaaacaaagcaaacatctatcaatttcctaactaccagtacgtcttttggcttcagaagagagaaataaaagagtgaaatggaatgcaaatgcaattagctgaaatgttcatctatccaactccaatatatgtccggtataaaaattaagaccccaggcgcctccaacactcaaattcaatgtatcatgcctgccatcctctcgtgggatgacaatccggacacccaaaaacaattggaataccattccagatccagacgtgctctacgttatggggtatcgctttccgggctttcaactcagcctcagcggctgcaaaccagatatcttgcactgaactatgcaggttctgcgcagacacgcgcgcaaaaacaaccgagtccataggatccttttcatacatcgtcgtgtcctgatagaagttgtacataaactctttgcgttgcgctcgctggctcccaccgtccccgatctcagcggagaaaaactcaacgatccgcacaaacggcgccaatgtgagcaacgagctaatccacgagtcatcaatgtcatgtccgtccaaagacatagcgtagcgtatatatgaaacaagcagatgcatgcaatggtgtgttgcaaccaacgccgccgtattggtgaagggagggctttggaggatccgggtttgtagctcgcggtacatcctctggcgtacctcgagcggtaatggtacagggagctggcctgcctcgtatttttgtacgagcatgttcgtgtgctcgcgccgggcggatgcatatgattcgaaaaaatagagtgtatagtacctggtagagaagaggtcagtgacttgctggggtgaagcaattctgcgctgtccttacatgagtggtgcaaggtggaaccatatgctagctatgccgcgttttacaagggcgttgcgctcgtttcgctttgcaggaaatgaggccttcatgacggccggttcagtctggatgaatcgatcgaggatccggtctgccaggtagtagcagagcctcgagcagagcatttgccgtcgccgcagcccatgcaagtacttgaaggtataaagatggccgcccctggcgcttttggatggtgggaatagatccgataacagcacgacatcgtcgccggggtttcgagtatagattcgatcattgtcgatcggggatggaagggtaccgtggcgacgcaatcggagatactgccggacaatctcatgctcgttgctggtgagcagttggcaaaaagccttgcatacgagtctcagcggatggaagtctgtgatgccggagtatgcgaatatgcggatttgaatctcgacggggaggtcccatggcgagggtagtggaggatctgcaggatcctttctaacagcgaggtgagtcagtgaaattcgcggcttgtcgcaaaagatctcaccttaaagttgatccacgatggtccttggcacccacctttctcctgttgtggatcgcagcccgtactttctgaacggagagggcgaatttggcaaagccactcattcttgggccctgcagcacatgaattgactggctcccaacgagaagcgcactttaccggggctcatggagataaaacaggttcattgaagggggcaatcttaggctaggttccataaatagcacatgactaagcccctcgatggtccaccctcgagggctgggcactccgtccgatcaaatgtattgaaagacaactacggagtgattgtagcatccaagggcaaattaaatgctgttatttctagtagaacatgataagcttggctctgtcgaatacgagcaactagaccaaggtagtcaaacaaacatgcaaggagcaagatgaatgaatcatggttccacttagatgcaggcaatggtctgatatgaacatgacatagacagtagtcaagcttgatatatagactatgcaagctgcgtcgtacagaacaaactgcccagatggttcgatggaatccttacgagtttatataggcctgggcatacgtcattgcgtcaatggcgtgcccaacatatatataaagacctccctaaccccataccttaagcatatcactccaactcacaaaatggtcgacaacatcctcattctaggtgccactcggggactaggtgcctctctgcggacactgtactccgcaaagccaggaacccatgtgtttgcaacctctcgatcttccaacccagagccaagctcaggtgtcacctggctgaccggaattgatatctcccagccagatgtggggcaaaagcttgtttcgcagcttccatctacaaagctatcgacagtcatcattagcgctggttactttggctttgaaacattcgattctccagactgggagaaggaggttcagatgtatacgacttctgccattggtcccgtctttgtggtacacaatcttgtcaaagccggattgttggaccagggcagtaaagtcattctcgtcagcagcgagagtggcagcatcacattgcgccacgagaaagaaggcgggggtaactttggccaccatgctagtaaggctgctttgaatatggtcggcaagctcctaagtttggacttgaagccaaagggaattgcagttggtctggtacatcctggattcatgcggacggagatgacgaagagcgttggatttgataagtactgggatgcaggtggaggtgagtgaccattttacaggccttatgacaaggcttcgggaacttgttaggtctaatgtctgacctatatctcttggaaaacagccgtgacaccagatcaagcagcgaaaacgcttgcatctttcatcgaagattttgatcttagcaagaccggagaatactgggcgccagcaggaccagggtaagaaatttgattgtctattatataaacccaggctaatctatcatgtcagagatatcggcaccgcagaagttgttcttgggaagaacctgccgactcctttgcaacttccgtggtagagagtgaaatgatgaatatgagctaccagagccacgagtctacttcttgctcaaacccaagtacctatactaggcaccaaatttagagtaggcatttcaatccgatacccccggtctcgcacacataaacaccaaatccctccccatgtcctttcgttcttcatgcccaatgactttcacaccaagaatattcgcgtagaaagcctgcgtgcgctcatcatccgtcatcaacataatccgacgtagataaggcatgttttccttggaaaatgtttccgcaacacaaccgataagccatttcccaagtccttggccttggtactcagggagaacgtaagtatccgacagataagcaaatgtacaaccatctgtgatggtatgagaaagcccaatctgctcagtgttctccggagatggggtggtagcatcattcacaggttgggtccacctgtacacgccgaagcacaaggagccgtagagcatctgccacagcaccttctctgggatgggctcgttgacccagtaaatgaagtctctgttgagtgcggcattgactgctttgacagagagtaactttggatcggttgagatgaagaattcgcggttggtatctcgtgtccatgtcttaggtgggagtacacttgttggcggggtagaggacatggtgaatgtggggtgctgtatgctgggtgcgtgctggattgtcttcgagaaatgcaaatttatatgcagttggacttcaagaaatggatggtatcttgagatgagttcgttgtatggttataggcgaagagattgtagtctgtctggttatcgtgagtcatgcgctaaaactgcacttggcattacctcaatcaatactctgtacatgagtctgacaagaacgactatatcgcgacctgccgacaaatccaaaaatgaaaagctggccgatagctcttcatttgtagttgatatcggtggaaaactggggttgatattcctcttaagtatccggagatcgctgctgtatcactgtaggatcttccgagattgctcaggtgaagctgattgccaatgcgcaagttgataagagcaagttgataaaaagatgacggctatgttcgtgatgtgtaagaacagcgccggtgtagtcactcgagagactcgggtatgttttacacctggggagtcatccatactttaggcacgtggttcttcacgactgcctaataaggctaagcaacctgataaacaccaaaacgcaatggtcaagggctactccgagctttaatttatatagttccgccaatagaagcatagttgggctgcaatggagatgatgtcgctgttcacacgaatttgtcatttactgtagttgtgacagtgctgtatccttgctgtagtagataatgatctgtactacggagtactccgtgcaatcctttgatatgcaaccttggaaacatccacgatattaattcgtctcttccagaacttcaccgtttaaataccttggcattcaactcgaatcggccgagacaaatggcgacatttcaatttccaacctcgataccccaacttgtactccaaccatggcactccgcaatggcgtggggagtggagaggatggtgttcacgatagcccccctcggcacgccatctggaaccgcgatggtgttagcgacatcaaatcagtcccgagaacatcacaattatagccgcataaccgactgcaatcgtcccatatgaagccaattatcagattcgatgcgctggattgcaattcgcattatgtggcgtgtaaaacgttgcgcatgacgtgcaggtgggggtgaatctacaagaatgccgggatatccaactatgcgacagcggttacatgtttgtgctgtgattgttttactccagagaaaagataaacggataagcccatcatgactctcgtacaagtgcccgtggctctttcctcaaatatcgaacctgtctcggaatcgatcaagggtccttcagaccgcaatggatcgaccactgtaacggtgaatagtgatatcaccggattatcagagaagcttgagaagatccgatttgaactggaggagcacccggttgatgtggtgcgacccatcaaggtcggtattatcggcgcgggtctggcaggaattaccgcgggcatattgctccctgcgaagctaccgggactggatcttcgaatctatgataagaatgccgatgtggtatgttaatgtccattgatgagttgttcgacgttaacattctttagggaggcacttggtttgagaatacatatcccggtgttcgctgcgatatccctgcacatgtataccaatccagcatctcgccaaatacccaatggacggaagaattcgctcagggagatgagatcagacaatactggcagggtgttgcacggaagcacaatgtgtaccagtaccttcgcgcgggacaaaaagtgcagaaggccgaatggctgccggagaaagggaaatggaaggtcactgttgagcatgtagatggctccaaggtaagaaatagttattgttaatctgaacgttctatgcttacatccatgcacagatctatgaggaagagctggacgtgttaatcaacgccatcggtcatttcaatgcctggaagctacccgactatgaagggatcaacaattacaagggaaagctcttccattcctcaaactgggatccaaccaccgacctgaagggcaagcgaattgctcttatcggaaatggcgcttccggcttgcaggttctaccctctattcaaccatttgccaaccacgttgatcactacgctcggaatccaacttggatcgcagattcattcagcagcggaaacgttggaatccgtcgactggagccaaattcgttctccgaaacacagctagagacatggaaagatcccaaggcgtatcttgaataccgcagggataccgagaagggatatttccagcgctttggagcaatcttcaaagacacacctgagaacaacgaactgcgcgagaaatggaccgccctgatgctgaagcgtatcgcaaacaagcccgaattggcagataagatcatccccgacttccccccggcgtgtcgtcgcccaacaccaggccccggatatctagaggccctatcccaagacaacgtcgactacatccagacacgcatcaaacgattcaccgagaagggcattgtgaccgaagacggggtggagcgcgaagtggacatcacgatctgcgcaacaggggccaacgtcgaccacgcacccccgttctccatcatcgccgacggagtcgacctaaagacagcctggaaacacgatggcaaattcggattcccttactcatacctcggcttcgcaacacccgggttcccgaacctcctctggctcggcgggccatacgcctctggacacagcggcacagtgcccaacaccatcgagaatcaagtgacatacatcgcgaaggtgctgcgcaaggtccgctcgcagggaatcaagaccatcgtcccgtccgcccaggcgaccgatgacttcgtcgagtactgcgaccggttctacccgcgcactgtctggtcggcgaactgtagctcgtggtacaacggtggcaagcccgggtctcgtatccacggtctcttccccggtagtgcgtcgcattcgaattatattcgtcgggatccgcgctgggaggattgggagtatacctatgttaacccgagtgggaatcggtttgcttactttggtaatggctggactacgaaagagttggctcctgatgcggagctaacgcctcatctgagattgcccgaggagattgatttgaagtctcacatggagggatggtgggatgtttgatttggtatggagttcgttagactggatcattccaatgcaagagtgttagtgtctatttggatatacctatacatgaattagcgctgggcaatactattttttttcccctatttgttgagactgttctgataggacctgctccctgccttgtttagtcttcttctcaacacagtactacccgtggtttcctttatcatcactatttatgctcagtatagatttgatatgaagatgaagccatatgatattctattaacaagggctagcaacaattttttatttgttctaatgcagatattctacttagattcctccaatgaataaggaggcacctcctggcccgctttccagaagtatttcgcgcccgggtgcgcatcagggagtctggactgacccttctttccgtacatgttctcacggaaagttccacccttgacagcgtagtccgaccagaacagaccacggcgctgcaactccggcagaagtagacgaataacatcgtcaaaggtatcagggagactagcatagctgaagttgaaaccgtcaacatcacccacagtcacccatcgctccagctcatcagccaccgtcttcacactgccaatgatcttgacaccattaccaccgagcaccaagtactcagcaatagtcttcttatcccacttctggccctcagtgccaggcaccgtactagcccagtggttcaccatactgcgaacagcaggaagctccacgaaacggaagtcctggtcatcagagtaggtagacagatcgtaaccagtccagccaccgaagagagcaagcgcgccctcccgatcaccatatgtcttcagctcctcgaacttagcatacgcctcctcgtcggtctcagcaacaatcaccaaggcaccggcaataaccttgatatcctgcgggttgcgtccgagctcggcggcctgctggcggatactatcaacggaaggacgaaccagctccggcttctgcgcatgcaagaacacagcctcggcatgtttggcggcaaacgccttacccgcggtcgacgtaccagcctgcaagataaacggcgtgcgctggggactgggctcacagagatgagggccgggaacctggaagtactttcccttgtgattgatctcacggacagccttggggtccgcgtaggcctgggtcttgctctgggtgccctgcttccaggtcacggcgtcgtctcgccaggacgcctcccacagcttgtaggtgacgtctaggtactcgtctgcgatgcggtagcgctcgtcgtgctcgacctgtgtgtccaggccgaaattgcgagccgcggagtcgaggtacgaggtgacgatgttccagccgatgcggccgttgctgaggtggtcgactgtggagaagcgtcttgccagcgcgtagggggagtcgtatgttgttgaggctgttacgccgaagctgattgattctgtggctgcggccatggcgggcacgctgtagagggggtcgttgatggggaattgggcggcggcggggattgtcggagtgaggttggaggggcctcggtatacatcgtagcctccgaggacgtctgcgaagaagatggcgtggaatttggcatcttcgagcttcttggctagggcaatccagtgcttaatgttcttgtagtccgcgccttggtctgcggggtgacggaatagacctgggttgagatgactcggcgagtgcatcgcaaaggcattgatgatgagttgcttcttttcggaagacatggtgatggtgagggtggtgtttgacttgggatgattgaattgagttgaattgaattgaattgaattaattgagtctacaacagctctagaggggtagattatatttattgtccctgcacgtgttccgtatctgccaaccccgcggtgcattgtcgtgagacgtgcaaaaagacgtgcagttggaggccgatggcgtcagcatgtaaatgtggggtgatacgtaaattgctaaaagggttgggattccaaggttctcatggattggattggatcggatttgatattgaaattcgtaacatgtgttgtgctctctacgtttatcttctctcgaccgagtgaagtatggcgcgatgttatcccaatcaggaatgagggatttctcttcctttcatttctatacttgctccctttttaggtgggactatattcatacttggcattgatcatggtgaaatggtcaattgtattcaccctcccaatcgttgttctacattgaacttgatgctcaattgagcagtggtataactatattcggggttggtttaacctagtcgttacccgatttggtcgattttcgatccatactacttcttatatagaatacaagccccaagacaagaaaaagtacgtatccattgttattcagtctatctatatttaaaaaaatatacaaaaggataattgtaacatcttctaaccgtcatactaaaagcaaaaaaaaacaaaaaatgagtgcatcatccgtgaatcgaacacgggcctcgtcgatggcaacgacgaattctaccactagaccaatgatgctagttcatataagagggcttactatttcatatcaagtagtttatgacggtgctgcttgttaagcgagccctagacactgcctcactgagtcttggggccaagccaagcacatggggccaaagatctcttgacccgagcttccgatgtctcgtattcgctctcgctttcgggagggttccaaggttctgacagctcgtgtggtggggaatataaagttcacggcatggctgtgggatccgccttgcgccctggaccattaacccgtagtctcaatatcgacatacctgtaattgccatagttgctatctgcgaaaggcaaagggggcatcgtggctttttctaatcctggggtgtcatgtcggccacagcggatctagagctaccaaactgtcaacaaagattagtgcatgtaaatagcaagggcgaaatatatttttgggtattataccaagcccggcatgtctgcgattgttgaacgctcccatgaggtggaagcagcttcattgacggtatgagctgagtgttgaatgacctttccatcccttcgatattccattgggtccaggattcaaatattctgggatgaaactctgcagaggcctagtctaccatataaatcctaccatctggttgccagataatattcctggtgcaatatgcaatgccaaagcactaggtctttccctcgcctggaaacaatctgctgttaaaccatcgtcaaagctcaattgagtcttccgtctcaggctagagaatccctaagatagccccccgccaaggtttcccggatgatttgcagtgagtgtgctcaagtaatcgagcacttgcgctacttttgctatcagatgagaatcattaaaagggcctttcacatggcccttaacgtatcccataacgatatatagccacgcccgatcggtagagaaacgatggatacgcgggacgcgggatagtatgatcattgagttcgtaggtttttgataatcagcctcgtcttcactgagccttgtccaaatttgataacgatatcattcgaaatccaataagattccctgcttggcgcccgcggacaattcgatcaagagccttattgatccacagtccgaaaaggtagttgagtccatttctcccaaaaaagggtgatcgtatgaagttcaaagcggcagagtttctgactgtgactcgggcggtcggttttagctacacgaggaggttcgagcactatgacgacgcccagacatgcccagacatgcccgatcagaatgtgcaatgtcggcgatgcgacgcaggattcgaggaatgggaatggaagattaccttacatttactgctacaatatatggcttccaacctttgaagctatagccattgccaccttgataccctacaatatggatatcaactagttcgcgccgcaaacagccatgacgatcctagctctcattcggccccctcatgaccagcgcccgacaagactcagccatggcaagagggaggcttagaaccgcttatccaatcatatccagtcctgtgggcattgcccaagtgaagacatggtctcactgcggggaagcgcagggaggttgtgttgtttaccttttgactttcgaacatttaaaaccttacgacttccccccttcttcatcccttctaaatcaaatctctacctttgaacatccaaatccaaaggtccacaacactgccataatatttgaaccatgtctgcaaacggcgcaaacaccggcaaggctcccgcccccaatcatggtcatggagcacatcaacctctggtcaatgttcagccatttcatatgagcgatctgcagcccaaatacgcgcatcaaatcgatcatgaggatgataaccccgattcgcatggctggtatgccggtttgagtgagttacaccaatactgtatgcgctgcgactctcttcctaaccatgtattcctcgtttagtccacggcctgggtgaatgtatcggattctttggagctattccctgctgcatctgctgcccgaaccccttcaagtcagtcgaccagggtgcggtcggtttgatctcgcgattcggacggtaagtgatcccctctccgccatgcctccgaatatcacttactgacaatgattaattctagcttcgaacgatcggtcgatcctggtctggtcaagatcaacccgcttagcgaacatatcaccacggtcgatgtcaaaattcaaatcgtcgaggtgccgcgccaagtctgcatgaccaaggacaacgtgaccctcaacctgacctccgtcatctactaccaagtagtctctccccacaagaccgcgttcggtatctcgaacgtgcgacaggccctgatcgagcgcacccagactacactacgccacgtgatcggcgcgcgtgtgttgcaagacgtgatcgagcgccgcgaggagatcgctcagtcgacttcggagatcatcgaggaggtcgcagccgggtggggagtgaaggtcgagtcgatgctgatcaaggacataatcttcagcaacgacctgcaagactctctctcgatggcggctcagtcgaagcgtatcggtgagagcaaggtcattgctgcgcgcgccgaggtcgaatccgccaagttgatgcgccaggctgccgacatcctgtcctccgctccggctatgcagatccgctacctcgaggcgatgcaggccatggctaagaccgccaatagcaaggttatattccttcctggccctggccagcccgggcagacgcagcttagcactgccgagaactttggcgaaggtcctagcaagtacggcactatctcccaggacgataatggactccagcatgcagtgaacgctcgcgttgtcgaggacatctagatgcgatcttgatgcgttttcctgcgtcgtctcgttctccttttatttaattggtcagtctcttgcgtgaaggcatgacccttttaccctttccggaaggtggatcatttgaagctgttcctcgacagctcattcgtctatgctccctggattttcttatttctgtattatggctggacgtgactggatccatgacgatacccaccttcgtttgcgctactatcgcagctgctttaatgtctctttaatgcccctatgactgctttatcataattatttcgtctaatgcaatgcagcaatgcaattcttgctatatgtttctttctttcaatcgcacctaatataccaggaccagtcagtcggcagcgataaggcacgtataaaaacgcgtctcacatgatagtagatgcgccacctttgaatcatttaaaataactgccggtagaaaggctgaaagggtttaaatcactgaaatccacttatgaaccttgatattctcgattatgtacatattccgcacccctaactcgatcagatgttttgcgcagatggcgttcccgatgaggctcagttacagccaagacatggcatcttccagagttgctattattgcaacagtctgattcctagaacagcggtgaggggatctataggatttgttcggatgtagtttgatttggtttgtgtatgatattgacttcttactcccaactaccctctaccttccaatctcattcgatcaactatatacttaggtagtaccccgaacactaagaaccctggactctccccagagtctgatcctatcccgatcccgatcctcaaaataatctactactggttcatcttagcccggatataaaatccagagccgctccttgccaagtgtggatagtccatagtcccgaggcttagcggaggattgcggattttctggaataggtatgaatgccggtagacaagcgatgaggcgcttctatatgtaccaggaaaacacgcggggcgatagccgaaattaacactggttgaagtggacgggataatttactcggaatatgattaaccaccgacttccgcataagcagttaattaagatcatgactgatatcacggcttgttcaattcctatgtaagatgttaggtgagtactgcatataaccaggaaagaaccaagctccagaaatgtacaacataaagtgtacaattcactgaagacttttatatgaaggatcctcgctagttagttacacttgtaagaatgtggtattatataacacgaggaatagagtttttttccaggcgagtgaggctccactaggagcgttgtaaccgacagcatgggacgcctaaatttacgtatcagacaatctatgatcctagacagcacattcgattattattgccgacagtattaccccctgacagaaggctttttcgtctccgtaccaataaggacccgagtgttatgcaagataatgtgccgaggcatacttactgttgagtccttggatggactgttcgccaaatggagtagtttattttcgcgtaatttaaatctaattaaatggggttagcgctagataaagggctagaataagccctggatgatcccggtatataacatagggatcagaacacgctgtagagtaagcactgtgaagttactcttgcggtataggatgcagtatactgaagggattcctaacatataccctgtactaagacttgcaattgaaagtcgagaattgaagttgaaccctagtttttttctaaaattaaatgaaatttatcggtaagaataccagattaataccacgctaactatgcactaaaatatatgatgggcgaatcccaagatagactgttgtagattgggtagagaaacgtgctgtaaaggcgctaagcatgtgagtggacattgccgatacagacttgggaattttccgtgggtgatattttctagtttacttctttattgacaaatgtaaatgttctatgttcaagtgattcactgactcaatttccgaaagaaatagaaaataagtccaaagtttggccaggtttgaggcagggtgacgggaaactaaccctggaggctgagggaggatatagagtcagcactaggatatatcgagaggagctaagatcaattcggatatggcactgcaggtataaataaccaaaataaaccccctttcgatccattcggaggctgataattttcgttttcccgctatacattctactctttcgcaacactctgtagagctacctagcagatacaacttccaaatgacgtctactataccaggattagttgcaagggcaacagcagattcagatctcacgacgacggccatgtcaagtatcttcactgcccccgcctcatgctcggagtcgtggacattcgaaccagaggttgcaaacagtgtccaaaatggtctcctactgcaaaatgccgcggcgagcgacaatgctgatccggcgtgtttcccttctggatacaatcattatggaagagttcaagcatctcttgtctatagcccaggctattgtccaggtggatacacctcagccgagttagcggctcaaagttcgacaaccgctgccatctgctgtccctcgtaagtgaaaaacagcagatcctggttcccggcttaaatattaacttcgaggctctagtgccttctcctactacgaggaagcaagaggcgactctgagacattcgccggatgcctaagtcgtcttcctagtggatcaagtaccagtgtcaccgtccgccagaactcgacgagcacagaagtcagcggccccatcacgatgtgggcacaagcaatccaaatcgagctgcaagcttcggacctaagcctatttgtctccgccactacgacacccaccactacaacaacatcatccgacacctcatcagttccgaccagcagcgcaaccgcttcatcaacaccgaccagctcaacagccccaagcacggggtctagcggcatgtcgacaggagcaaagattggtgttggcgtcggtgtcggcgcaggaggtctcattatacttgtcgctctggtattctggctcttccgccggcgtcagaacaaccaaaagaagactctagcagatgcaccatcgtcattcggagggagccgcaccgcacctagcgagcttggtgcggacggtttcggtgcaagcccatcataccaacgcgggggatacgtaacaccaagcgagcttgggagcgagccggcgggatcaactagcaagaacgcgaacactactccttctgaactatacgcggcaccccccggtccaaagttcgtacatgaacttggtgcttagtttttttttttttttttcttttcttttgttctttcttttgttttcttgatttgcaaagtcagaattataccccctttctcgctcggctctcggcccctggcataagtctatggaactgggacatgaatggttttacgtgaatatgcgcatgctatttccattgaatactggagtcgatgagcggcggtatgaggatcttggcttgggcttatcaagtattatgccagtacatatacatggatggtctccctgcattatggggcttgtttggggacccatgatgtaaccactatacctcagctacatagttaatacattataatcaccattgcttattttctagtttttgtcttgaatgcttttagggatgagctagtgacctggaaattaaattagtgaacaaattacggagtaaagacatgtagagataactatttgatctcttttgtttacgctgtatagatctcagaccaaaagcggccatgagctatacctaaaatgggatgacaccatacctaataaggaaaagagaaggcggtggggcgtggagatatcgatccccgcggaggccagctctctcttcaaatgtgaattgacctggacataaattgccaaagctcctaagtcagagctccacacagatggcatcgcaaacatacagctcgtccgttcgagctggcctcaaaccatcaaaccccgctccccccaacttcgccgatccaaacttcgacccggccgagttcctcaatgactccctatcaccgcttactgtggcatcagcacaacctagcgcctctcggtcacccggatctgttcccctgacagagttatctgcgcaggtccaatccctcctctcccagattagcgcccaaaatatccgtctctcgagcacgttatcccaacttaccgacgaaatccttcgaagcggtggacgactggcctacgaagttgaagtcctacgaggcgagacaatcgggctatccgaaaccctaactgaagtcttacgcgacgatataacaaagttcgtcccggggccctcaccagaagacggacgcaaggccgaacaagaagaggatgctcccacgaacgaagatgagtcggcagaaacagaggacaagaacaaacccgccgccccaacagacccagaatacataacgaacctccgcacactgaaccaagtgagatcgcgcctagaagacgtcgtacagaccttcggcgacgcaatgagctggccgctgcccccatccgagatctcattctcgtcatccttcatctccgtctcaggaccagacctcggccccgaaggccaagaccgcgaggaaaagggccaagaaatgatgaagaagctacgcgcagaagtgactgagctactcgacagtgaaggcggaggatacgccggactggatgctgccaatcgccgcgttgaagccctacggacgctggcgattgtgtggaatgcatcggccgaggaaaaagcccgtaatcggttcgtggatagcctggcgaatatcgtggaggaccgacggcgcaccttggaccagcagcaggcagatcagaaccagcgaggccagtccaagtccagatttgaggctcggcgggatagtgacagtggggcaccggctggtgggctgtttcggaatttacagcgtttgagagaggaaatatatttggagtgaaagaatgggttgttcatatatggtcctgggtgtctgttgagctggttctctacattgatacttggtcttcgctgtatagtattttgcatcttttacgacaatcttgcattttctggtctccataactccctgtctgtatatggctgtttgcactgctctttgcgggatcgccttccatatccgtcgagttaaagttgacgcaggtcattacgtagtcgtgaccagcctcgatatacataaactcgaccttttggataggagcgacgtcagttgctgttatgaacttagggctattaactacactatggggttgagcgtaactgaagggaatatagtccacagactatacagatccttcgggaacatctatatacagagtagatgtagaaatatacagttatccaagacccatgaacgtctaatttaggtgaatgtgttccttacacgtggagacacacaatactattattctcatagccctagatatggttatgaatcatcatctacctgagggtccaaaggcccaccaggtgacgagctgacgaagtgacgggagtggcaccgggaacgttgcgccgatcgcagcctctctccctctcctccaaggtgattgcgtatgcggttcctgacctcttacaatgttccatattgctttacccagtatctgattcgacttatttttgcatgatggcgtcggaggacgcgccactacactttgaagataccaagtcgactccaatgctgtggcacgtcttccaccgtcggtcacgggcaaatcttaaaacaattggtttgtcggtgattgcattgttcttcttctttcttctgctccagtcttctccaacggtaaggattgctttctgctacacggacatactattgccagacctatgacaaagaagctgacctgcctagcgagttgaaccggacttttggacaaagtttccctctcgccatccttttccccagcgcccggaggatgcccaggtcatcctgaatcctcgtaccgatattaatgttaacgatacccttccccacgatctggacaaacccaacccgcgcttgcatgtcctagttccagcctcgcagggctcgcgcggagtttgccgaacgctcacgtcggctatgatccttggatacccaccgccgacattaatcggttacgaccatcaatctcccggagcgactgaggccgagcgcatggtggaccggatcacgcgcgcgcgcaactacctccgagacagcaagaccgtacacgaccgcgactttgtgctgatagtggatggcgcagacacctttttccaattgccgccgaaggtcctagtggagcggttccaggctatcataagggcgaacaaccgaaagctgcgggacaagtttggattcgcaaaagtggagggccaaaatgctggggctgcgcctgagatggtacagaaatacacccagcgcgttatttttggtgcaagcaagatatgctaccccgggttgctggacgaccccggctgtgcatccgtgcccgattcatctctacccccggatgtgtatggctggaagactgatgcctacccggatggatccctgaaccgaccccggtggttgaatcccggagcggtcattggtcaggctgcggacttgcgtctgatctacgatgaggtcctgcggcttgttgagatgcgcacgaacaagtctggagatcacatggccttgacacagatgtacggacggcaagaggtgatcagagaactggagcggcggcgaagagccaatgacttcaaagagttgctttaccggatggtaggcatctctgatgcagcaaatatcaccgggattacccttcggctggagacaggtcaccgttacgagtacggcattggcgtcgactacgagtcacaactcttcttcaaccagatcatgtcccgcaaggacgtcgagtgggtcaagtttggcaacattaccaagatgtccgcgttgcagatggaacatggcgtcccgcgcgaacaccgtatcctcctaccgcaggacattgcatcgctcccgaacccattcatccagtcgcgcttcgcaaaagaatcaacccagcgcccagtgtggaatgccacactagacaagctcccgaacccgcgcgagcgcaactggcacaatatttcgctaatgacgaatgtccactccgcctcggtcccggtaatcgcccgtctcaacggtgaccccaagctccgcaacgcctggtgggagaatatgtggtttttcccatggggacgcgcgctgctgcggaagtatgtccgcgactcacacggattcgatgcggcgcagtcgtcgctgctgggcgggcaggactggttggaggtgcgcggaggtcgaggtgggatctggaccgatgatgagaactgggtcaatctttctgagatgtgcaatggccaagaaagagatctctttgacgatgatctcgggccctggggtaaggaaaacggtgacccagatcatccggtttacaaccagtatggaagtctcattgctgggaaggaacaataactcgactaaagctggactttgagttattatccttcccttttactcactacattattctcgatggatcgatgggctgccgggttgttaagacttcccgttcagctcgccgtccggtggtcaccatccgcctgctctgcgctatacctccacatcgagtttcaagcttatcaggctctggactttaacgagttttggagtaaagatatcttttgtctttttcatgaccgcctgattgggtgagccactattcatgacctccttcgggatgacatggccggattcaccggagaattcggacttattcttatgtcgaagctgggattctttcgactgttatcacgaatagctgtacattaatgcgactggctttgcatgactgcgacgcaagagtctgttgtatgataccgtcatagatgggaccttggaaagggccggctgtttggtgatgctggtgtatatagaaagcaacagaatgaacaagtaaagtattgtcgttcgcatctggactaatcactcatgtaatatctccaccggtttagatacttgatcatttcacagaatcttgaaacggccagagcttttcccatatcgctctctcttcttcatttgctgactcccgagtcagaaaagctgatcacctgttaaactgacaggtgatcggcttttcgtcaacggcggggagtggtgagcctgcgatgcggaatatcctatattatatcaagacggtcaccctttctataacttccttcatactcacgcgaagaatcattattaaattagcgcactcttctaccatttcttaggtcagtagagagtaagcattacatagtatagctatctaacttattctcaaaatccgaatctaacgttaaattaggagggtgccatagagcaagcggcaccgtcaagtttacacgcatcattactacccgtctactatccactcatgtgcctaatagatatttgactgaaagtatgaccctcactgtcagatataccatcttgctcatagtcttccggtttacatcggtgttcagcttgaaatagcaaccagtaccgcagaccttccgctgtcttccacgtggaatacggaatccgcttttttgggatcgtcactacgatcagaagcggacaggatcgaggcgtgcctatgaaagtaggcaagttttccgacgatctcctggagatgattttgatagttcaagtccagtcgggaccactaatagaaggcgagaataagcatgcatcttatcgtaactggtggatgtctgctcacttcgctttctccattgagttgaagaaaatgaaattggctgttgtcggtagaaagaccgaaaactgaagagtcaagcttaccctcagcccgacgttgcgtatgaatcatgcctgaataaagggttagttacgatggcagacatgacgagaaatcacttactcatatacgcaagagtctggcgcacgccgtcagcagattggccatgctctgtttcgaggatgaccatgttgatggccacgctttctttccctttcttcgcgtccgggccataccaaagaaaccaatcaggggtcccttggaggcaatgcactacttcattgtagacaattgggccgaatagaaatgggcacttggatgagatggggattggggttgaattaggagactctgggtccgggggcgtagcatggacagcatcaagtagaatacctaggcgaattttcacagccatctcaggtcttccatctgatctagaaatggcagcgtcgatcattttcaggacgatttctagacattaatagctatcttgccaagcgtttttcaatttggacttactgcagtggtctgcaagctcaaatggagcccgaagctgtgcccagtccgtgttatctgccctggtgaggtggaagatgcgctcaacatccgggaatgagaggacttcgactgaaagtttaggataccgaagtacctcttgtgtcgttatagacgccatgtcagaaaacagaagggtggtgtcctaagaatggcagaggtaacacaatgaccgtgatttactgctgtgggagaagtgagagagaagtgagagagaagtgagagagaagtgagaggagaaaaaagtgcgaggggagaaaagagcgagaagagagaacgcaaacatgaggtagtggcctaccagtaagtctttcctattttcctaacgggcttatttagactattcgatctacatatacaacatatacaacatagaaatgtgctctcttacggaataatagatagaattgaagtcattgccaatgtattatccatagatttgctatttgccaacgtttactcgatagaacacatatcccagtcgttgatccccacagcgtcagattcctgagcgtgaagctgtccagatttattcgagcgaggataagccatgacggctttctcgaagaagtagaccagcattcccagaaccttctcacagtcccgactgcagcgggccatgactggatgaacgctccactagtcaaatgttaacgaggcagtcagacatgtataatataaacgtactcacattggagtcatgagaaatcttcaaaaaccagaagtctttatcatcggtcactagcccatagatcgtgcaatcatttttctttaaatcctttcgacgcctgtgaacgcagccttggaacgatttagctccctaatatgcaatgacagaaatattataggacacttacccatagatgctagggtttgggctatacccttttgcacttcgccaggtttagttctaaccacagcagcaatcagcgcgagatcctccatatcgccgtaccagatcccatagtctagttctccaaccaatgtgtgcttctttttatccaaaagcacaggaccgtagctccatttgtgtttgatcttgatgccgaggaaccgagcagcctcagggagatcagacagaacgatatcacgagcgagaacaaggaggctggaggtaaaggtagaatgtggataggctgcagatgcaggaacctcacgatcaaatttcgataaatccaagtaagcgaaatgagatgttacctctcttgtcagttggctaggtataggaacaggaggcacagtcctgagctcattgtcattgacaacgtactccagattgcagatgacctcgatgtttttaatgagcagagatgtatttgtgagcatggttttggatgtgattctgtagatgaaggattttgatactatatggtgatggtttgtgtatgtgcccaggtatgatcatataatgactgcttgacccggcgctttaaatagaaagctaaattgcctcatccacggctagaaggtctttgacggatagtgacattgagaataactctattgtttctaattttggtataggtcttccatggttgtaggtcaggatatagcataccaagatctaggcctagatacatacatagagtccaaaaaggcctaattgattagttactagccaaagcgctacgtataatagcttgagatgggtaattccaggcaaatataatgctcggttgatcgtggatgtacaacaaaagacagtagtttgaagaagcacactggtcccttttttggttctagatatcaaacatctatgatacaacatccgacttctcaccctttcacgttttcataatccgccgtaagggtttccttgataatagccaaaatagccttaacatcttcatcagacagtctgagctcccgttcttcaataacaccgtccatcaataccaccgcagtgtaatcatcctcctcggcctctccctccccttccccatccacttccattgattcctctccattagcgccttcctctctagcttcctcagtagcaggattgccgctcagtcccaccccgagatttagaatcataacgacctcggctttggtcagtccgtatggctgtagacgggctactaattctcggagggctgtgtccatgggtgttatttctgcggaggggattggtggcggcatggaattagtatccgcctctgggtttgctgaatttgaggttcgcagcgtgccagtcattgcggcttgcgactgtgttttcgactgggaggaggaagggcggggtgtgtagcgggggtatcgtaggaggtggggggatagacggcttgcatagttgtgaatctgggagtttatcagccgttttttcttctatcgttggtctcttggtgtctggtttgcggtcgactgcgcttcacggtcgggctcatggtgtagttgaattaggccataacaccctgtataccgatgagaaggacagcatagggttgctcacttctttgaccactgtattatggtctctgagatctggacttggtgcccagttccccgaatttggcggtggtcggcggggtggattggaggttagataggccaggacctcaacattggtcaggacggcggtttgagggtcaatgatctagatcattgtgttaggagaaatcccgagcttcaagtgaaatagaacataccctcattttgtgtgttgaatgtggcaagatagactggcgcaactgggtgattggactgagaaaggaaaattgttcgaactgccggcagaaactgggcggtgtctttatctacctgcatatctcgaagtatacgaggcaaagcaacggagatgagacggaaacatacatatggagttagttgggactacattatgcgatacatagcctacaggtttacgatccagttgtgaagtatgaacagattattccagctaaaactgtactgccttgttcctaacgagcaccctctgcgccagtgaaagaccggtagatcaacctcaaaatgctccaaaacatgcgagcaacaggaagattgcaaaaaaaaaagaacagaaatgaaaaagtgtgatatcatacagatcccaggaaagccatccggtcacattgcacaaacttttgaaaacatacgcttactctcccttggacttcttcttcttcttcttctcatcctcgtcttcggaacgcttgcgcttcttgccatcgtccttgctagccttcttggcatccttcttggacttcttcaagtccttcttgctgattgaagtgggattgcccgctttatcaaaagtgatctcgccacgctcgagcttccgctcgtatcgcttgacgctgagaccagccttagcagccaattcctcaatgtcgctcttcttggacttcttcttgggtgcctcatcctcggactcatcagaatcctcagcctccttatcagagtcggcatcggccatctcctcatcctcaacctcctctacaagcttcttcttctccttcttggacttctgaacagcggcaggctcctcggaggccaaggcatcagcatcaggattgtacttgcgggcctccttcaagtcgaacttctcggcctgaacaccgttgggagcaatggccacaccacggggcttaatgggcttgccctccataccagcaagcttgcgctcaaggttgaagcgggcctcggtaccgagagcacatttctcctcctcggtggcatcgtcagcccactcggtgagggagtcgacacggataccaagagaggccttggcggcgaggatacgggccatctttcccttgttgcggccggtggcctggccgatcaaagaagcgtggtagatcagaccgtacttgggagtatcgtgcttagtcttgagggcacggaaaagggccttctcggcacccaaaatctggatggtactggcggggctcttagacaagctggtaagggaaccagcgtgggcaataagacgggcaccaacaagatcaccgacaagggcagtcaaattgggtgcgatggcgttcatgcgggaagtaaggtagctagcaagttgggagcggtactcgtagaagccaacgacctgctcggcaagagcctggatgttctccagatcctcggggctgatctcggtacccatggagcggtcggcagcagccttgacggcaccctcgatctcctcggggaggatctcagcaagatcagcggagtcccagttggagcgcatacccatcttcagaacgagcttggcgtaggcaatgttgtcgttgaggatcttagccagctcggggaagtgccatccgtaccattccttaacacgcatagcgtaggtgttcagctccttgtcaagatcatcgagaagaccaatggcctggacgatcatagtatcgatcttgtcgggcgagaacttgagcttgtgacgggcgagagagtgggacagaccaagggacatggtagacatatcactgggggcaagaccgggaatgagggttgtgaggtgctcacgaatggcacggaagatatcgttggtggtggagtcagcaatcaattggatgtcaagaccgggaagcttgctgatggagtttcctattcacgatcacagtcagcatacatcccgtaggaagaacctttagaagattgacctaccgagcttggtatcggcaacggcgagggacaccttcttctcatccttgatgctgtcaagaagcgaggccaggcggggggtgaccttgccctccatgatggaggcagcctcctccagagctgaagcagcgctgtcaaacttctggaagctcttcagcttaagactaaagaggttttgttagtgccattgtcgccgataacaaaatttttgcgactcttcagagttggttcattcccactcaaatttttttatttggtaggattggaagacacaattgacgtacagattggagacaccctccgcagtagaggcctcctcggcgatatcatcacgcttgaggagcttcttgtccttggccttcagcagggcatagcccgcgctggtctcagtgaggatgaaaagcgtcatggtgcgcggccacggcgtttataatcgaaaaagaacagaaaagaataaacaagtcaaagcgaacgataaaccgagccgaggaaatgtcgaaaaaaataattagcgtagggcgtgtcggccaccggtgtcgttggagaaattgaatctaaatttgcacggaagaaaaaaagttgaaaagcgggtgccacgagtggcttagccgtgtggctaggtgcatgactaagccatatgcgtgtcctggacggatagagctacagctgggtctctccaatcatcttctccacattcaccatggagggcctattctttaatattaacggcgggtatgtggtctatatctttgcttggtccgaatagcgcccgttgttgactctcttagatacgttgagggcattgttcgcggctatcggaacagcctgttgaccggccagaactattccaacctcattcaatgcgagacaattgacggtacgcttcattgattccgctgactctgtcgtagaatataccactgcatattgattctgacaatctcgtccaatagatgtcaagcttcagcttgctccctcatatggcgacgtccttgcctctctttcccccaacccctccacgtccgatctggcgagccgcatgaccgataaactggtggctgaattcaagtacctggtcgcacaagcgacaggctcatctgccaagtttctcgaatatatgacatacggatatatgatcgacaacattgccctgttgatcacaggcactctgcatgaacgagacacccgggaacttttggagcgatgccacccactgggatggtttgagacacttcctgtgctgtgtgttgcgacaaatatcgaggaactgtacaactcggtactgatcgagacgccactggccgcctacttcaagggcagtctgagccaccaggacttagacgagctgaacatcgagatcgttcgcaacaccctctacaagaactacttggaggacttttacaacttcatcaatacccacccagacttcagcgggacaccaacacaggatgtcatggcggagattctgcagttcgaggcggaccgccgcgctatcaatattactctcaactcctttggcaccgagctgtccaagctcgagcggaggaaattgtacccggagttcggcaagctctacccagagggcagcctcatgctttcccgcgcagaggatgtcgagggtgtggcattggctgtaagcgctgtggccgattacaaagcattcttcgatgctgtgggcatgagccaaggcggtggcggtctcggtggtatgggcggaggtccggcagacgggaagagtttagaagatcttttctatcaaaaggagatggatatgtctaagctggttttcacccgtcaattcaccccagctgtggtgtacgcctggatgaagctgaaggagcaggtaagcctcttagaatcaatctctctgattttaagagtatgaaactaatatctcccaggaaattcgcaacattacctggatagcggaatgcattgctcagaaccagaaggagagaatcggaaacttcatctccgttttctaaaatcgactcgggcactctgtgattttctgttttcctgcctctttgtacttacccatctccctggctggcattttgctttggttgccaaccgcttttcgttgtatcgagtacccagtttgttctttaacgtgagcgcatcgacctcttttccttgatcgggagaatccggtcatctttaatttcggctgtgttgctttttttcctcattcgtatgaggcgtttggcatgtgcttgaccttatccttgtagcatagaagaacaaaatacagatatttattttgttggtatacggcgggctttcctacttgaatagatgggatgctcaagtttaataatacttgccagtccagcgcagtaagccctaattatgctagtaagagatccgttatggatatgtataaaggtctccgattaaaccctttttgcgatagacagtcctgcaagtatcgctcttgccgcaatgaagaagaatacacttgccaccatcattgcacccgaaaagacctgtaacccccaatacgtcccgttttgtctactcaagatggctccagcaatgggacttcctgtgagcgatgcaatactgatgcaagtaaataaaacgccctgacgaacaccaatcttggtcacgtcgggcgagatctggcctagcagggccggtaccataccgacaaatgcacccgatgcaaatccatatagcatgctaaatacaatatagatggccgcactgcctggggcaagaagggtacctggaagccataaggctaggatcacaatggcggataatgagcacatggcaatcatgacgttgaatcggcctagtttgtctcctaggtagcctggtaggattcgaccagggagactgcagactaggttagcacaatggcccttctcgtcaagtcaagatagacagtagtaatacttacctggcagcattaagtatagttgacaagtacccggctaggtcgccgttgacaccgtcctcctgagcttcgacgacaatgtaactgattggcacgaacatggcgaagaatccacagcaggatgccagcacaagcaagacaaacggtagctcggaaaatggactcgtataatcattcagtttcactggccgtggaacattccttattctcgatcggacggtcaagttggcagtgaccaggagtgtgaggatgatgaatccagagatacgcagtgaccatccgaacccaatactaggcaaaagtcgagataacatgcttgggaatacaacgccacccagtgatgagccgctggaaactattccaaaggccaaggcacgtcgtttctcgaaccatgtcgcggtacaggagagtgcggacaaaaagacaaagcttgcaccaagaggactgcagattccctgggctagcaagaattggtagtactccgtcgatatggagatcatcataataccaaagacgtgaagacatgttccaataagaagaagccattttgggccataattatcgaatacctgaagaaggttaacatgtatacctccaggcatgatggggctagactcactcttccaatgacaattccagtcgcaaagagtacaaatggctccaaagataaaatccaggagatgctggacgctgaataggactgtaattgattattctggtagtgctcttggaaaatgccaatggctggagcgaagtgtgtcaggttatcggtggcataagaaataggtatgggaggactcaccattcacccagccaaaagcgcaaaaaaggcagcaccatgctccaaagacgaccgtccaagcaggaagtccttgatccaactgtccaactgcttcctcctcatctgagacggccaccgtggttttcgattctatgggtgccatgtctagaggaaatctggatgatgagatgaggaattccaacggatgatcgcagaagcaagggcgagagaaaagaaaaagacaagcaaaacctctttccaacctttgatgtcaaggaaagacataactagatcatacatatccatgtaagaacagagagtcggagagatcccacagctccccgaaaaatgacactaaaaagaaagtacagaccgaagttacatcgggaccaatcaagtccagattagacagacttaggtgtacagttatagtttagcttgaggaataaaagataagattgacgatctctccttatgatatcataggatacatactgtactccgcatagatagttgcctcctaaacgggctatctcaagccaatagattctgcagaatatattcgtctctttgcaataatagattaatgattatagttttcttcaaggatgatagctgaagtgaatgtgtattagggcatggcacggcccggagaatcgctgcggatccaaatcgatataacccactactactctagtatctacatagaaaatgaggccaaaccctatgatagattcatcggtaaagtgtttagatagatcatggtagatatagagaaattggtaggcgagggtgaaataactagctcgatcatcggccactctaggtttatcatcgtcaatgttgtcttcgccgcgcgacttcctcgacgagtggaagttataaatatggcaggcacgttcgggttccatatccttagatcgtcataaaatgatcaggcaatctctaaatagcttcaattgacagaccagataaattgatcgaatgaatcatcataaattgattgtgaagcgccagatcgatcttgaacaagaaagactacattcaactgaataaggaagatggagaaagaaagaagaagcaagttgcaaagtggcagcggccagttgatatagctgaccactttgcaatgttgcaaccctcggaccttcttggtaaaccctatgcagtttatagacctctctgtggcattcatttccctctagtgttgcgggccacaagattcgggatacaaagaacttgtgcaaggattccagcattgttttgctacaaaacaaacctgcaatcttctagaacgatctgctacctcagtatataaatgtcatccctccactctacttccaagtttgaccttcaactatatctccttaattaacatatcttccaccaacctcaaccctcaagtgtcgacccctcatatatcatctatcaccttacatttccaggtaataccctgctcgacatgccacaagttataagaaccaacaaatcgattaggtagaggctctactcccgtgactcgtcatcacctctgtggtgcatcatgctaatctcgactgtctctctagatccatgccggtattataggccatcgacagaaggtgctttcctgtctctcctgggctcggtttttctggttgaataaaacggggacgtgtggtgttcccttagacgccgatgatgatgaagacgtcgggtttgattgggactccaagtctgtgggtgtggttgatgacttgaccgctgggatagacacttttgagaaggataaccgtcattcccactgtctgaggagtccgcatgtggcacaggtgagtcgttcttgtgtcgatcctgtttcggtgccgatctgctgacctgatgggcatttcgtgtcttaaagtgatgatgagacatccttatatagttatatcctatatatgtatggcaagcctccacatactattcgaaagggtctatactacgaacagcacctatggccagttaagaaagttatgtatgctctacacaatgccgccaacgagggagatgaaagcagagctgcgagaataagtgagtgaactacaaaaggaaggggtagaaggtgtggctaaccgtaactacatatagagaccgtgtgactttgtcttatactcaacgaacaactgcattaggatctatcgacgtacagacaagacaggactaaggagacatggcggtacaagtgatggtgttgaagatcatcgaagatttgcagttgcgaatggcatacacccgaaggactgtaagcctggattgcgattcagcagggctaggctatgcatttcaatttatcaactggcacattcctctcagcggtctttcgcttgctcggctactctcagaatgtgagagcaatgaagttcaccgaagttcaggagctctcagttgcctagtgatgaacatggtgcgcagtattttgccatgggaggtacacgggtatactgtgcattgggctttcaaagcacttatgatgagacacgagaaagcatccatctttatcatcatatgatgaactcgagcaaatgaatattccgaatatatgactttccgcgtatcatttattctagctgcgcaaattccgctagtcgcttagtatgttgtagttagtgttcacgtccacggatggtaggaaatatgcaccctgcaataataacctgccaatgacggctcacggtcccatatgcggccaagggaactgttggttagtatctttgtccagtattttcttttagaccaatatgacacgacccgggatatcaatactgtctggtagtagtgactccacgttgctctctcaattcgtgaaagtgactggttgactgcactcttcggatgtttaggggtccatgaaatcatgtactctgaatgcaataggtgagtagcaaaatggaaagggaaagggttcgagtgctagacaatacccgttgtaatatgcaaggatagagactgatcaatcaagcacagaccgacatgcatgagcttcaatattggaaagtcttacgtctccatgaagtatacagaccagccacattgatagtctagtcccagaccggcgattacatgcatgctgaaaaagaaattccccatttcgattcaacattcattgttcatatgtgcagatggcaaagggtgtggcagaggtagatagtatcacaggaaattcgaaaaagcaagaaaagccagccaaagccagatgagagcacgcgacaggaaaaaaagaaatgacagaaataccagaacaaatccagtgtaccaagtctactgcgagcctggatctatggcaaggggaattgaggttgtgggggtcgtagagaaaacgtggaaattttaggatatcggagaaaaggaaaaaaaaagtttaggcagcgatcagtcatactggaagagaacactgatactttcaccatggtgcacacggcggatggcctgggtatacgtcagtaaatgttcggaatagccggatgtatggaactcacctcgccgaaaacgtggccgacttccagaacctccagttttgggcaacggcgcaagtgctcaacttgatccacgctgttggtcacaacaaccttgtcaagagcactggcgttgatacgctcgatagcgtcgccgctcaagataccatgggtgagaagggcatatacctgagatgcgccttctttcttgagtaacttggcagcacgagtaatcgtattcgaggtatccgccagatcatcaatcagaatagttatccgatcacggacatcgccgaccaacatcatggtggcattctggcggtcggtgattttggtggggcggcgctcctagaaattgttagagtaacaggaaaattgaagagctcaatttgcctaccttgtggatcagggcaaactccatgcccatttgatcagcgattgccgtagcgcgcttggcacctccagcatcggggctgacaatgacagcctgcttgtaatttgggatattgtgctgaatatagctcttcagaagaggtcggccgtataggttgtcgacggggatatcaaagaatccctggtactgcgggtcgtgcaaatccatggtgatgatgtgatcggcgccggcgcaggtgagcaggtccgcaaccagtgtgccggcctgtgcaacccactgtttgtagccaggacgcggctggaaggaagtgatcttggaggaggtgctcgctgcgtcatcggtgccgttggtcaaagacttaagggaatctgtcgtatcgctgcgaggcaggccgttgccccgccgcttcacagggctgccagtgctgtcctcaatctgagctttggcaagacccttctggaggctttcaattccattcaccaagcccaggccttcagttcttccaccaggacccggggttgaaggggtgctctcgaatgtgtagccattgctgggtttgccccccacagatgccttgacgagaggagcaccggccttgtcataaggaatatcactctgacgagagtaagggaaaagagggagtacagcggtgacccgccgggccgaagcagtcttgcaggcggaaatggtgatgagaagctctagcaggtggtcgttgactttaccgccgccggattgaataatatagacatccttttcacggacggactcttggatttcaacccgagtctcccccacggcgaattttgagagcagaacctccgcgggaggaatgccgagaacattgcaaatgctctgagtcaactgagggtgggagttgcctccgatgacgacaagattgcgaaccatcgtgttggcttttgtggatatcgccaggactggagtaagagggatcaagaagaagggcgctcgatctgaaggaaatcaagtttggagggatcggatggagggggaagaaaatctggggggcgatctcggtgagcagtcaaggcagtaaaaaaaaataaagaaaaaacaaaagtatagggattcttgagatgaagaaaacaaatgctacctcatggcggaggaagaattgacacttcgagagacggagacatgaaaccaagaaaaaaaaaaaaccgaccatgtgagtcccgcgatgtgaaaaaagcctctttagagtggagcggacctgtggctggtgcctcaggtggcaaatgacccggattgggtaaagcgcatgtcgtgacgaggccccgcaaaaaaaggccctgcttctggacagacaggaacgcagtaaatggtcagcaggtttactgcttcggattctccatttgctcccggccatagatatacatgatttggttcaattcccccggtcgctttggaaatctcgaagaaaaagcaagaaaaaagaaacatattcatgactcctatgctccggtccccgagatggtatgtactaagaaaagagaaacataaaagagcttggcataagtctcccaccgtgcagtttgctccgagaatccgtcattcgcccgttccgacctccctataatataattagtatgacagttccggtatccgaaagcgggtttgaggctcacaagtcaagttgaactccgttgctcactccataatcctccagtgtaagctgatctttgaaagggcgttcgccctgacgtttgagaaggatttcgtggggttcacggccgattcgagctgccacttgggccttgaatagctctgcgtagaacattagcacactggtggcggtcaatagtaaaagggagacatactgatcggatctgaggcaagacaagggatcgcagctttagttcccaggcgatcattgacatggaccacgatcataggttctgaggattgtggagcgaccggtttcttcttttctttcttcgctttcttttccccgtcttcgcgcggcgcatctcgatcggcacgttgttggccccggtcgcggtcaccacctctcggtctatctccagatcggtcaccctctcggtcgcgtcgtggtgatcgtggtcggtctcggtatccgcgctctaatctgcgatcatcgccgcgggaatcgccagtgcggcttgtgtccttccatcgaaagcctccggtctttctagggcgctctctatcagtgtttccgcgcgggccaggagacctgcttcgcgatcggtcagccatgactatggatggaaatatggaagttgcgtgggtgcctgacaacccagatgtaatctaaacgaagctataaggcacgtgatgaaacgcagctgcccagtggagtacgctagtccaaatttgtattagcgtgtttattcacatcaagagctctcctgtctaaagtacgtttgaatttctccgcacttttgatctgcatcttgaatagacaggctataatgcaaattggcaactgattctggctctgttatttctttcacctgactcctccatacccaaaatgcgaggccgactagaagttcagcgtccctctccgacgaccgtctcctttaccgtatcgaatgcgccccagcagtcaagttcccccgccaaaataatattcggtctccaagtacttctgcgtacggttttatttttctgtgttattggtgtcggcatcgcgcgtgtccgaaacctcttcttccaagaagatgggagggtgataagctggccagccctctggtcgagcccgctcggatccaaactgtgtcgcttggtggattcatacaatccactgggaattgccgtggctggtgcattggtgatatacggtgttttcagaagaggtcatatcggtaggttgagaaggaagagttggctatattgctgttcatggctgattgttcgacagaggaatcgctcttggttattcgaggtttcggaatccagacctcgacatcttcctcgacatatctttctactgcctcaacgaggttcattcctacgacgcaaatccaggatattgtgattcacgaagccttcaagggcttcgaagtccgcttctatttggcggtcattgttgaaggcgagcttgatgccctagtggtcttcccggtatgtaatatcctcagcgttatactctcagacctaattttgcgactagcacatgttgcccaggcgagagatcttagagcaggtttggagaggttctcgacggtgtctttacgatgcgaagtcatgacatacccacagtctcttgcctcaagaaatttttgctcgtgcaaaagcctaccttgctcaagcccgaggctcgatgctttatcaattatatacagcgagattcattccgatgccgcttgtgcaccctccatccttgctagtcttcgctgctttgtgagaagtcccttggcattttgaacttccacggtctccatcttacccttctggtcgacacggatgtatttcccgccaacaacagtatcgtttccaccacaccagaccttggcacctctgtgtcctcttttggaataacccgccttttgccactgtttgtcaagattttccacgttctggtcaccctggctgacagtcaagtctagcagagcacccgctagaatctcatctatctttcgctttctccaaacggcccacaaactttcaacggtaccccgcagcccgaatttgctatcacccttggcggttcccttgcagtttgcagcattgtcaccagcatagacccagttcaaggaatcctggcgactgtcggaattcagatcggggaaaatgcagtcccaaagcaccagcggagcatcatcagccattgcatatattggcttttgtggattcttggtaatgtccagcagttcagggacgatagatggggactcgaatccctgtccgactaggaacagaattgcaaccatgtggcgcacctggtgccacaagaaggcagaaccgtggaggttaaacgagtagacctgagggatactttgagaaaccgtattgggagtcgtcaaatccggttcgggcacacaaccctctttggcctggaatccaggttggccaacataccccacggggttgaccttgggattgacggcttcgatactagagtgaaggataatgcggtcgaaattatcaatctgcttgttggtgtccaacttgcagaaattccggaagtcatgcataccctcgaaatgcttagctgcctcgcgcatagcctcaatgtcgagccagccctcacggaactcagcacgcgggccattgccgttctctgcgcggttctggaacccaaggggcccgggtgtgggagcgaacgcggggttggtgaagaagtacttgtaccgacgttcacggcaggagaagcgggcatcgaaaccaggcggcgggttaggacaccaagccaggacccggatgtcttccggaagcaccctgtttagaacattgatatagttcatctcatcggctacatcatcccactccttttcagtagatcccgagtcaacgcgcatcgcatcctcgccctcggtgggagtcttgggcatgggtcgttgactgcggacccgcagtccaataacctgcccaaaagcgctcacgcccttatcggtacgacctgctttggagtaatcgcatccatcccaataaaggtggtaggggcgcatggggacgcgctcccctctttcggtcggctcaagatcagaggtggtgccgggggagatgagttttgtacgccgcaatgccttccacataatctcttcaacggtaggcagaggcgtggtattgccgtttgtatgttcgagcccattgtatgcctgtcccagatatgcgaacttgagcgcaataaaccgcgttgtgtatttggaggggtcgaagctgcgctcgggtcttggaggtttcggggctttgacaagccgcgtcggcgcaagcactggggtactgtcgctatcttgaggagagtgtggtcgcttcgtagaaggattgaagggctcggtaagaggaatcgcagcctcgtggacgtcggtagcgatgggcgcggaagaagagcagggtgtctgcaacgattcttcggttggcgctgtgaactctgtcgtcttagaggacagctggcgctctaactctgttatgcgcgcgatcaggctggaattactccaggccgagtagtcgggttggcccttgcttttagtgtcctccatggtttgggatgtgagagtgcgagattggcacaggtatcgtgcttgcctgagagcgtgctgtatgttgcaactcagtggaaagagtctagcagacactctccacataccacatcagcgactgagtcaaggattggattggtgcggacgtttaaccggcgggaatcgaaattgaaaaagttgcgcggaggcgctgtttggtgtatttttagtattgagtccctgtacgaaggtgtaattacatgcactttatggtcatagctgtatgtattcaatgtatatcactgtactatgataatttatctgtaaataaattactatatgggctttttaaatcattaataaggcaatataaagttttaataagcataaatgacatgaggttaggactagcgaattaatatatatataaatcaacaactgtgttggaacgccaagcaccgaacttgatcacccaaagtattcattctctgaaatcaaatacaagcggcgaaggtacttatatagactgtcctacattcacaactgagacaattctctgcaatacacttgttaattgaccggccgaagagtgcaagttgaccgatacctggacagttgcgcataaatcgaatcaacagccattccagcatggctgaggcagatcctcacacagacggtaacaaaccagtctccttacttctactcggagatgaaggatgtgggaaatcaacattcttagcgtgagtacctagtcatccgacggactgcagcctagaagctaatctcctgggctatatatatgacgttatatgggaacatgctaacatgattcagtcgcctaaagagtggaaggtcatccccatcagggacctctaataatgactcaaataccattgaactattacgagatagtgatcagcctttcatttacgacatccgattcgcaaaaaaaacattcactctagaacttaacgacacatccaacccaaaccagcattggacaagccttcgtcctgacttggtcgttctagcctatgatatctccaatcgagacacacttactgggctaaaggaggtaagtcaaatatataattggagtaattgtaaattggtgctggaatttgacactattgcttagtggcgaaatgatattacccgttacttccagtacggtcacggcgagcgccttccagtaatgatgctgggcctgaaaagggacctacggagggaaggcgagggaatcatctatccacaagaggtgagtgactatgaattggagtttcacgccttgaaaattgacagttatctaggcctatcgtattgcgcaggaacttgtttgcgatagatatgccgagtgttcggctgtcacaggcgagctgcttgcagagacgtttgaagatctcgctagattggcggcaatgacgaccactgcaaaaggtggccagactgagggcacttcttgcgttattctttgattatttcgtcgtccatgttcgcatatgcggctttctaatgttgaacttctttatttttctattcttagtagcctatgtttcagctagagagtatgctctatgcaaccactaagatattacagacagcagaccagattctaaataacaaataccatggagacaaccaggacagccaatacagatatcagtgagtgcctttctagcacttagaccgctaccgcgctgactaccaggcagggcgggtggaacggctgtcgtctgcgagctagcgatccaagtactagaaaggcttattgagagaaagagagatatactaatacccaaatatagacgaacaatgaagtctacagccaggcactacactacaaaacctactggatatgataccgagcacaaccttttcagattactagaatacacacagggaagaaccaaggtaacgattaagtccacctcgtgaattgacagcacagggctttcccccagaagcttcgtaaataaaagcaactggatctctttccctcataagcgccagtcaatgattggcaatggcaattcctccccgatgcaaaaacatggaaataaaaaaaaaaagtgctggtaagatgagaccactgaggcaaaagattgaaaggttcccggtgaaagctcgttttcttctgtttttcagtttcttttcgtttttttggagaattgcacacagggactaggatagacatgtcaagggaatttgagggagattgtaatccattgttgtgaatggagtagatggtgtataggagaaaacaagagcctttccttgattcccgtgcctcgaaggacccagaaaatcatcaatcatcccagatcacccaactttttattgtgatcaaacttcccccctctcaacgactatccttgtcaccgcggagcaatttaccacttagcctcaccagcggcgggctgagcctcagcccactcggtggtagcgggagcggagctggcagcccagtcaccaccctcggcatcccagctggtggcaccagcagtagcggtggcagcggaggcagcagcgaaggcagtgccggggttaccagcgccaggggcggaggcatcccagttctcaccagcgaagccggactcgacggcaccagcaccgatctcatcagcaccggggaccttagcctcatcggcgatctccttgttctcctcggcctcggggtcgcggtagaagtagagatcgacaacggtatcccactcggtctcgcgggtagcgagggtaccgcggagacggaggacctcacgggcgagcatccaccagacgagaccgatggcgtgacgacccttgttgttggtggggatggcaacatcgacgaagtcggtgggggagtcagtgtcgcaaagggcaatgacggggatgttgacgtaagaggcctccttgatggcctgggaatcagtgcggggatcggtcacgatgatgagacggggctccttgaaagaacgggtgatgtagttggtgaagttaccgggggtgaaacgaccggcaatggcggtagcaccggtgtgggaggcgaacttcaggacagcacgctgaccgtagggacgagcagagatgacacagacatcggcggggttgtcaatggcggcgatgatacgggcggccaggacgatcttctccctattgcagtgaaacatatatattagacactatattacagtcagaagtcacttggctgtcgcgcataccaggtcttgccaatgttcaggacgttgacaccgtcggcgcggagcttccagaggtaaggctccatgtgcacctgaaggttcttggaaccaaggtggcactgcgcggcaaggagcatctcaatgtcctgcgcggtagggttgaaaaccgggggaagctgggaaggggccatgttgggcgattgatggattgatgagttggaggatcaatcgtctggctcttgtcgtggtgatggagggaaaaagatcaaagccaagccgcaaaattgttgcactctcgcgattcgggagaatttcgcttgcgtgcgctagggctagggctccggggctgggcagttgattacataatattagtcttgattcctcgttcacgtgatactaggtgcctgagtcagcggacgtcctgactaggattagcgtaactagacctccggccgcaagatttcccgaccaaaggtcaatggaaaagagaagttgcttgtgacaatagagccatctactcgccagctacgcccaccatgcccccgcgcgtttcagtccagtcctctctgaaggcattgaccggtatgctacttgaaatccgtcataccaatcgttcaattacctgggtgctaaccaagacttgtttaggatcaacttacggatataccccgttgtctaattcgatcaacactactaccagagctgtgtccagcaaggttcaaattcgaaagaaacatgacccattcttgatggcccaggcgcgccagcgcaaggcagcgaacgtctcccgccagaaagtccttgcagaggaacggaactcctcggttggcgaccctgtgaagagccagccgacaccatttatcctagagatgacagcaatccaaaccaactcgcacatcccatcatctttggctggggatctcaactactacttgaagtcgaatgagctggatgccgctcttgacttctccaaggatttgacagcaccgcttaaaaaccctgatcgcaacacagccgatcctcaggttgagaaggaggcagtgaatttgcataatcaagagcataagaatgcccaagaagcaatcaaccggattgtgaacttgaacaacggaaacaccaaggaccgcgtgcgcctcaacattacaaagtgcatcgaaacattcgggcgacactacacagacttaaatctcccaccaaagccttcggctgtggtccatggatctgcccctgtgcatccggaacgcgcgccgcgcgtcggacccgatactggctctgcagaggtgcaagccgcgatcctgaccgtgaaaatcatgaacctctcccgacacctcgagactgccaacaaggacaaacacaacaagcgcaacatgcagctactagtccacaagcgccagaagctgctacaatatgtccgcaagaaggaacgcggaggtccacggtggcagaacctgatggggacattgggattgtctgacgctgcgtggaagggagaaattgctctatgaagggctttgtttaataagaggtcttttgtgtgtctgtaccattctcttcttttgtgattggctggctttgaaaaaagtatcagcatgttaccttgtatcatctatctaggagctagcgagggctacttgttggtctatgtctctatttctatgtttcgcccgcagagtatctgtacaaatagcattgtttcttttcccacatccattctcgtgttgaaatcatctgaagtagccaacttgctattgcagcataagttctagaatgtattaagtttcctctaaatgatcagcggtattctcatatgagatggcagtatctcgattatgtaggctatttattggctatagatgtttcattttgtattactatcggaatgatacagacgtgtgtatttcacttctggtctttagtgctaacttggctaataattatctttttgatctttgctatagttttaggaaacaattttagtatccagtgatataattatcgacgttgaacatatatgtacatagttacctctaactactagtatttacgtactccattgaatatacgtaactaagagatctcaacagtgtagttagttatcgcatcttaagaccatagctcagggaacgtcttgaagatgcaacgaaagttacaggaggaattgcgtttggaaaactcagtatggaaaattttattgttcgtgaaatagccagttaggacatgaggctggatggtcgagtaaggactactttttcagtgaaggcggtagcgctggaagtttattgtcaagtatgtgacgatcccaactacgtatatctctactcaacatggacggagggtaagatttaatggacgtgataccaatgcgggaaccaggttaatctatctgctgctgtagtcgccggacctgaatgagaagtttgtttttgccgagcttcaaagtatataagacgtaattggacctcctccatagatgatctattaagtaggtcagggagagagacgaaagcttttcctttgcccatttcctagattcttggaagccttcatctttcatctttcggaggccctcttggtcattgcctcatgttaccctctttccttgtatctactaagggcacgatagacttccgctcctctgtgtttcctctgttcatcaactgcgtagaacctctcagttcagtcgttccaacgtaaccgggtcttgtcatctagaagctaacaggcgatggcccacgatttcggtctccaacgtctctgaagtcgctcattagagaacccacgccacctaagttaacgttggtttcccgttgcctaattttgtcggggaactagacatcctcgagatcgacaaccataactttgccatcatcgcagctcgcattgtcgcagaacgataaattgtctactttttggtcccagtgttcagcaccatgctcatataatatcttgagagcttccataagccgggtttccaaatttttctcgtggaccttgatcttgttgtgagcgaggtcatagagagtttgacgatgactgttgtgatttatggtggaatagtccgttcaagttctaagcggtgtactgtgctacatcgtgaatgtagctgcttgacattttttcgcagtgatggcttggccgtctagatagaacgtctaatgatgtgtgagccggatcaagagatccacatcgcggctagaaatatatattttacctgggaggattgagggtcagggaaagggcatcaggcctgggtagtgtatagagtggaattaacaataacctagtgaaacaatgcgtgaaatcaaagaacaatgtcaataattggaacaattggaacaatagagtcccttgcgacagcctctatagagggacataccgcctagggacccggtattctgccgggtcgcgccttccaactccgaaaaagttatatgcgttggcgaccaccagacaatcgctggcgactgcgagacaaaccgctctttccttctaattttttggtcgcgtccaccgcattgtttacctatttaatcccctctcttccccccctctctctccttctcctcttctcctctccatcacccacaacattaccatccagagcattgcctttggatatctctcaccagagtcttttgtgatcgactctaccaatcagtcagtatttacatttgtaactagatagcctttggatatctctgactgactgatttcatttcaataagacttccctcactttccactcaccacaacctcgacaccaaccatcctcctcatcttgcgcatttcgccaagatgagactgcggtcgaaccacgttcttcggccagtttcggagtacgtcccacgccgccgtcgccagacgcggagtgcgtcggcacaggctgggacggaggccgcgacagagactgtgccagaggcacagtctgcaccagaccttgccgagcagtatgctgcagaacggcccgctccaaagcggaagccagttaagagagctggccggaagaaggtcagtcagaaaacaaatgtcacaattgttcattactaattcatgttcctagaaggccgcgcccaagggcaagaagaaggccgctcccaccgcggagcctgaagctgctgccggcaccgaagccgacccccaggaagaccccgttgcgctcattccgtctgtggagcaaccagacacccgtacgttgccccccagtcccacccaggctacccaggccacccaggctccccaggcttccccgacccccccggtcccccaggctccccaggctcctccccagcgcaagttcagagaacgagtcatgtcggcctttcggtatgggagagccagcgcactcctccaaagagagcctgagcgagccccttcccctccgcaaacgcccgtgatggagtatgcctggccgcctggccaagtttatgatagacttggccgaatcccctggtcacttccctggaccccaccatccccctggaggaactttcctcgcagatttcctggcgtcaatgccccggatgaatcccagctgacccccacggaagaacccactaggaaacggaaccgatcatccgaagatgatctttcgccttcgaaacgtcacaagttgaccctccaaaccccacctggcttcgaaaaccgtcctcgcggcagctctcgcagaacatatgcggatcgcgcgcgacgacgcgaagcggaaaggggaggacgaatcgatcgcaccatttaccgtttcccccaactcctggctcagcagggagaggatgcgaggtctggcagtttgacccccgtggcctctcaggcaagcgaagagaccgcacctcagggtaatcgcattgtcccgctatcctcattgccttctgcactcccaccgaatcagaaccaaaatcagaacagacctaattggcgccaatggatattcaattcagtgactggtatttggggacgaggcaatgcgcctcaaactgcagaggtcccacaaggtaggcgcccctcatatcatggcatatatttatagtggctaacatggtgattctagtggtcgaacctgaacatccaacgggcaatgactccgtcgcgacaccttcctcagcccccccttcttcctctgttgtggcgtcacgaaatttcgaatcgcccactccaagctcgcgcgttacagagccacaaaccgcaaactctcgtctgacagccagggcacgcgctccacaagtcggcacaagaaagaagtactcctacgatttggacccacaagggttcgacccagaactgctcgcgcgcatgcgcgccgggatgtcggatcctgcggacctcgaacctgtaacttcaatcgagcaagttcgtgcgctttacgataacgaatcgaaaaagcgcaagcgagaaacgtcacccgatgtcattccacaccctccaggatgtagctacgggtttgacccagattacttcatctacgatgacgatgattacgacgacgacttgcccacaggcgagcaggaactccaaggtaccccgaccaaacacgctacagtcagcgatgcaccggaagaggagcatgtctccaaacgtttgcgccaagatcccccaactcgacaggctacagtcagcgatgcgccggaagaggaggatgtctccaatcgtgtccgccaagataccccgactcaacaggctacagttatcgatgcgccggaagaggaggatgtctccaatcgtgtccgccaagataccccgactcaacaggctacagtcagcaatgcaccggaagaggagcatgtctctgacaatatccagctggaaagctccaacgaccaggtcacgtcggagcccattgagtattccgccgaggaactccgcaaggcccgtcagatcgcagaggctcgtcagaccgcagagcagtacaagccgaagacccccagtcgtcttcgcgcggcccatcgcttctcgagtagctgtaactcgtctattgaggtggaaaccgtccaacgtcgcaagatgagagaaacctcaatggctacggcatgccccactggcgatctaagccagatcgagtggcccgagactgaaacttggattgagacctttaactgggacgatcctaactttgagaaatatcagagaggatctttcgtccgcactgatctgtttcccactgaggaggcacattttgatgcttgtcacaaggagtttgctgaccttcttgctgctcggcgtgcagcttagtaaatctaacaaaaaaaaagacttgccagagagggaaccttcagaaatacctggaggtcgcatctccattgagcacccggttcccccctagggaacgaaatacaactacgagattccgaagagcaagcttctcggcctgctacttatcaaaaaaattgaaaaaattgaaaacaacgaaagaaaaagatggaagtcctccgggttccctggcccgcctttctaggctggggctagggctcccttggcccgccttgggtctctgatggaaccaggctggtgccggtttttgctggcccgccttggagctctgaactgggcttgggtcgagccttggaggaaatcctgtatacattctttcggcgttgtgactcgttggaccgccttggatgcatgggcctacgagtctacgtctttgtctttttcgtcttttgcgttttgcgctttgttcttcttgctatttagcgcatgtaatgagtgaatattagcgttgttaaggagcatttgaaaggattgcttagcttcccatacaagtcaacagattgtaaagactaggctcgtctagagtgacaccgagaaattaaacccaggatatggtattgatatagatatctattatgctattttctaacctagtcaaagcccttgaactcactatcgccattggcttcctccgccttgctagcttggtccaacaaccgctgttgctcgttcttagcacgaatctcctccagcatgcgctccgtttcaagagccttctgcttttgatcctctggcaattgctcccatctctccttctccttccgcgccttgttgaactccctcttcttgaactttttatcccgttcttcagtcttctgactccaagccacactctccgtagcacggcgcttgttaggaccctgctcagtgccttgtccattagcagcctccgccatagcctctttgcggcgcttttcttgctgcttgtccttgtacgtgtagttggaccaatcaagtttaatgcctagcgtccgatctccttcaaaggagcgggcttcgggcatcttcggcagcttgaggagtccccatgcctttccgagagcttcccagtccagatctgcaactcggaagatactgcttgcttggtgtttgctgtagctgcgcagccagctgacgaacgccttctggcccttgtcgtgcatagcgcgatcttttaacaccgctttgcggaccttgtctgtcgcggctgtggcctgttcgtccgtgaactcgggtaggttgtatggcgccacgggcgttttgcggatttccaggaacgagacgtagtcctcctcgcgacctgggtggatgaggacgatgctgaggcctcggcggcccgcacggccggcacgaccgcatctgtgaatgaatgttttggggtcggagggtgggtcgatctggactactagatcgacggagggaatgtctagaccgcgagcggcgacatcggtagtgaggaggatggagggcgttgtggaggtaatgaagcggttgaagttcttttggcggacgttggcttggtgtttcccgtgtagtgggactagcacatattcgtctcctaggattatgggtagtattgtggcgaggtagtcgacactggagcatgttgacacgaagaaaatggttttttgaggtgtgggctggacattggaaaggatgtgcttcagaatagcatatttgtgaagcggaggtgttgtcaagtaggtcatttgcagactgttcaatggttagatcggtcatttctgaatgggggaaaaattcaaaggacatacctcgctggagtgcgcttttcttcgacgccagctcctctgaccttgacggcaattttgacgggatttcgtagaccaagtcggacgatctgatcaacagcctcactgatactggcactgaacaatcctgtacgtcgctgcttgggtagccggcctaagatcttctgtaggtcgtccttgaacccaagatctagaagtctatcggcctcgtccaggacaagcatttcgaaagatgcctgagggcagtgaacgtgaggcgacgaaagtaactccaacaagcgtccgggtgtagagactaatacgttgggcgaatttttaaggaataactttagatcttctgccggagatgtcccgccgcccagaagaagttgtgggacgaccttcaatgtcgaggaagaggtcttcgcacgaggagcaccatcttcggcgggttttaaggctgcggccgacgctgggtggaactccaaaagggagagaagaacttggtgaatctgtgaggccaattctctgatataccgatattagcaacgagctctgcagacctggacttgcgcattacccaccttgtaggagaaatgacaatggctccaacatgatgcttcttgagaggctgatcaaggcgaagaagcttttccagaattgggatcaagaatgacagtgtctttccacttccagtgacagcttctaccaccacatctttgtgctgcataaacagaggaatggccgaggcttggactggagtcatgcgcgtgaagcccattgaggccacagcgtcgagggagcattctgacagcgggggcgtgagagcatcccacgctcttgaagatgacttgggaggcatttattaatctcaagagacaccgagtcgtcaaattgcttcacgagccgccatcgcaaagaaaaaaaaatatccgttatcgattagataccagacacgtgaccacggctgtggtcggaaaccgagatcgtgaatctgtttttctctcgacttagccttgcttcgtttactttacttttacatggtataacaagtgcttggtgatcgcatcatgtactggaatcctgccttgtgtctccagcttattcgtccataagtaacaataaagattcgtcacgtgccatcgaaccgcctatcattgctttgttagcaagcccattgatattttcgtggctcattcgtttgcgacaacgcagatatctgtacgcccaccttctggtgtccttcgagtcgtaccgattccttctttgaaattaaaggcgcccgacatgtcctggtcacaacccgtaccagaggcacctcgcgtgctgtcaccgaccccctccagatcggaccggtcagagacacccgacggatacatcgcaccgatgacaaggtctgcagcccgtcgccagcgtgagccagatggttcagccgaaagttctggctcagcgcgagaatcaagatctccctcggctcggcgcaaccgcccctcacaccccccnnnnnnnnnnnnnnnnnnnnnnnnnnnnnnnnnnnnnnnnnnnnnnnnnnnnnnnnnnnnnnnnnnnnnnnnnnnnnnnnnnnnnnnnnnnnnnnnnnnnnnnnnnnnnnnnnnnnnnnnnnnnnnnnnnnnnnnnnnnnnnnnnnnnnnnnnnnnnnnnnnnnnnnnnnnnnnnnnnnnnnnnnnnnnnnnnncccccatgatacccgcttcgccgccgcgctcggaaaagggtaccgactcgaacacccatctatccccaccaagcattaccgacgcgctgcgcgacttgtcaagatcaccatctcctctcggactgatccccctgcatgcacgctaccgcagtttcattcatcgccatgaaatcccgcgcaagctcttgcacgtgtcaatcgggttcttgactctgtcgttatacagccaaggcgtccaaacgctgcagattacaccagtgctctttaccgtactggtgcctattgccgcaacagacctgatccgccatcgcttcgagagggtcaacaaggtatatattcggtttatgggtgcgctcatgcgcgaaaccgaggtcaccggctacaacggcgtgatctggtatctcctcggagcgtacgtcgctctccgcttcttccccaaggatgtcggcgtcatgagcgtgctactccttagctggtgtgacaccgccgcctcgacattcggtcgtttgtacggccgctacaccccccgtctgcgtcccggaaagagcttggctggtactatggcagcctggttggtgggtgttgtcaccgccgctgctttctggggctggttcgtgccttacattggcgctttccccaatgacccagaagacgcttttatgttcacgggacgcttgaatctgctcccgaactgcgttcgcggccttctgggttgggagcctagtgattcggcggtcatcactggccctttgtctctaggcgtcatgagtttcgtctctggcgtcgttgccgctggcagcgagttcattgacatttggggctgggatgataacctgacgatccctgtgttgagtggagttggcctctggggtttccttaaggtctttgggtagatggataaatgatacactcctgattatttctcagcgcttgcacaatattccctgctctttttttaatgctatatctgggtgcttgacggttagtattcgggcatttttctcttttgctcctctacgttctggtattgtgctgcatcaagaattctattcttgtttagatagacactggtggaagccatgcacattttgatactcctcttcttttccgtttctattctttggatgtgtgttctgcatagctactttctgggacatggctttggtacgttttcggatatatgcatagggtattcttatttacaatttctgcgacatatgtacatggcatccagcaatccatcctcgagaagtcagctttcctgagtcttgatagaggtactcggcatgtttatccaacgccgtaggttaacaaaaaaatgcggttgctccacattgttgtatgcaaaagctccagacccgggaaaattcaaattgatgccatcgccaatccgccaaaacgagaagaagggtataagaaagatattaatcaaacgaggtcaagaaaactgacgcgtgggattcttttctttttggcaggctgagtctgtctgcgcgctgtgctcaggctatcggtagctgagccttcgcatggatcttgttcatgcggagacgggtcgatcgaccaaaagccgtcgtgcaatataatgttttccaagtgccctatggtcttatgcttcggcgttgtgctcgtcccctttgaagacttcttaggagaccaatttacctcattaatctcattgttttcgtatgtcttcaagttcaatggtaatgtatgttcgggctcgagttcgggcttgggatttgcttggctgcaagatcggggtggtctgatatcttcgacttcagaggaacgagtccgaacttttggtgcttgtggtgccttcttcgttggcggttgacgcaacgagcgagttgcggtgttttcctcgtcgattttcgatgacagagaaagggactcgatggctttttcgatgtgttcaaccctggccttttcttcacactgcaccttgggaatcttcttggtcttagataaagtcttcccggacagagaaggcagttccaagagtgctctggctgggaagtcctccgtgaaagtttcagattcacaaacgtcggagaccgagtagctaattttgagtcccatgcgtcgtgtcgggcgagacggagaataatcggtgttcatgtctagtgcgtcagattcttcaatatcaacctgaccagttcccaaagctgtgcgccttgatctaatgcgagactggtccgatatggggtgacgcttgatattggcagaaggagacaggttacacattgaagagaatgtatcaaggagaccatcgacttcccgagaaacgtagtgcatcgtcagtgaagacctctgcggaatatacatgctcggagaggaaaatatatcgtcttcctggtccacaattgttggcgaagaagacccagaattggccacaagtcgggaaagaggattctgagccgatgtagcggctttcaacaagtgtgtttgtttagttgttgacagttcggacctttctttcgtgagagttccgtatttcaggatactcccccgtttcattccagcatcaattggtccctttttcttgggaccggtgcgccgagtaccggtcttctttttcgccgcagcttcttcggctttcgcggctttttcagcctgttccctctcccaatttttgacgacctcaggaacacccagtcttacgacagtctcgaatatccagaccttctcgagggagaacggatcaaattgttttgtaatccgagtcttcgacggtgccggaggtggtgatccagcaactacctctgggtcatcctcttcctcagcttcctgtacactaacttcggacggcgggtttggttcctcggcaaggagatccagcccaacaatatctgccggtagcatatctagctgaagttctggcactgcatcagtgccgaaacttgatcgggttcgatacaccttttgcagaccaggtgggcaatcgggcacaaatgagaaaccaggcgacacgcctagaactggtctctggagacggagtctgtatgagacaagaggctcagccaacagtctgatcaatttccttgcccccgatcgataattccattcaaaatggtctgcggcaaatgttcggattgctagggggtcgatatctttgtcccaagcctgtacgagacgggttttcagaagtgccatctcttcatcaccggaaactttgggctgggcgtagtactcgagaatttgtcggtccggaaaagcgtctggaattcgaactgctgggtgtttcctcgtaaagtatccactctcattctcctcaagttcatattggagtctttctctccactcgttcaaccctgcatccacgtctgcttgcgacgcaagctcctgcagaagatcctcgccaaatccagccttggcaatctctgcagcgagcttgctgccgcatttcggaacaccagatggtaaatagtcccctccactgagcatagcgaataggatcattcccggtcggtcaaggggtatattggatggatgtccatcctgtcccattgcatagcatgtaacatgagttgctgaagagctgccgcttccgctctcttttgagaagttcataatagttaaagacgatccgaacatcaatgcgtcgacatcgttgctcatgacagcgtctacaatacctgcctgctgtaaccgtgcacattcggcctctgcctcgccgggtgcctcatgccacggaaacctgaatcgttcgatgaggtccttggaacgcttgatgatcggcgcactgccataactgcgagatgagactgctttgcctctcttaaaagcaggtttttgccgtccatcatagacaaaaagggggtggactggcaatgcaagtaacttcaataatcgataaaatagtgtgcgtagctctgggtttcttccgcctctacccgcttgaacttgaaagagccagatcgaaatgtcgactgcaatgcgaatcggtcttgctgtccgctcgaggtgcgtcactgccaacttcgccagagagatacgctctcctgggccaattgcattgatgagccttgaaaagttagtatttggattgaggaatctggagatacgaagtccggcttcttatgcgatggataaacaacgctttcactcggtgctcatagcgatatatatgttttccaccatgtaaaataaaataggatatatgacttaacttacccaggaatacccatgccgactgtaagcaatagaaatgggaagcagttcaagtgcccatgtggtgttagaagatgtacaatatgcagtggttttgcggagagaggaagttgtgaagtaaataaagacggcccgatgtagatccgttgcctaccaacgagcttcccccaaccatttgggccagcttatagatcttatttttactttgtctttgaatttaaaccgatggcattgaaacctcgacctgtgcgcaggtgaatcgaatatttgtcgctacgaaccctacgaactcctgttgctcccagaaaggggagcaacgcgcccaagctcatccaagcatgtcgagtgatacaccctcaatgggtgccagtaaacgcacatcagcaacttctggtctgcggaatatccagacagcgagacctgtttcccctcatacaccacaaccacattcgggaaacccctccttcgccagcagcacatcaccgggttccacctttcgaagcgaagacgatgcgatcatatttgagataggcgcacgatggctccgcgcaggctttgaaggaagcagcgcacctgtgtgtgtggttggctttggacctgaagactcgcggagagcgggggactaccgaggatggattcagggcagcagcggtgctggacggctagcgcagcccgtcgacatagaagagtggacacggacatatgaattgtggcggccagattctcgagaaattgatttgggcctggttgaggataagatcgagcgcgcgtttcgggagacatacaatcagttcctgttgacggatgcagggacatctcgcctggttcttgtcctgccgtctctcatgccacacccattgctgtcgtcattgctgtcgacgctctttagtcgatggcgcttcccgagtgctacccttctgtctagtgcgaccatgtcggccacggctgcgggattgcggtcggctttggtggttgaccttggctgggccgaaactacggcaacggcgatctacgaataccgcgagatgactacgaagagaacgacacggtctatgaagcatttgatgcaggaaatggggcttcttcttaccgggtttgcttccggaaaccagggtacggagactgtggataagatctctgttggattcgcgtactgtgaggaagttgttagtcggtttgcctggtgcaaatcgcaggcagaagaagatgaaaacttagatgaacccggcctgaaattgtcgattccttcgcccgcaaatcccgaggaagaatatatggacgtgccgttttcacgtctcgctgaacctaccgagaaggtgttattcgcaccaggtgtcgcagaacatgaattggacgacgaagaaaaatccttgcctttgcttgtctacaacacccttctctcactgtaccctgatgcacgaggaacttgcatgtcccgtattgtctttgtgggcggcggttctcgaattcctgggctacggcagcgggtccttaaagaagtctcgttcttgatcgatcgtcacggatggagtccaattcgaggcaaagcactagagcgacagcgacagagattggaggagctcagactttcggcccagaaagcatccaaccaacctgagattcctaagagcaatgtggaagcaccttccagcgatgacgaacccgccgacccctcgaaagaagtgcctgagattgatttcgtggaacaaaagctccgccgacaaaacaaagacatcccagtgcctatccaaggagtcttgcgcgaagttgaatctcttggtccatgggcaggtgcaagcctgacaaccagtctgaagatccgggggatggtagagatcgaacgagagaagttcttacaacacggactcgctggagctacaagagatattgaccatcctgttcctgatcgtcgatcgggcttgagatctggcggtgatcggtcgagttggacgcttgcaggctgggcatgaaaccatgtacatttttcaaaaacaatagataccccattggatttccgagccgttatttccctactgtttctctatatgaagcttcccaaataagatcgccgtgtttacgaggatctcggcatttaatcgcacccatcggttgaatgctggaccggattactttcaatctgaattattgggaggatgagattgtaaaagggagtggtggtaatgggggtagtttttgtcgaaattttagatgtctattatctgctgcacgcattgagggagtttgcatgtatagccaaattcaattctattatgtctgttttcggttgtgaattggccacaggtggctctcattcgcacagattgaggcaatgaatgccaaataagcgctacgcgtagggtccacgtagagatagatattgatccaatgcaagtatggttgcgcaccgtactatgaatctaaatagtgccaaactggtaggtagcccagttaacggcgggcccatcatcaggaccaaagatctggtagggaatacgaccccactcagggttattgataccatcgatccaatcctcggtctcgataacgaagcatccatacttgttaacatgggtggcaccggagtcaccaccatcagcctcgttgcgcttcgcctgcgaattcttagtggcgatggaaccgttctgtccactgcaggtgtagatctgcagcgcggcctggttggtagcgacgtcgaggctgatgccagtggagctggatgaggcactaaggaccgtggcgatcgagttagacgcgtatgttgagggccggtcgacgaggaagcacgtatcatagcctgtgcagccggcgccacagaggtcgtaggtcttctcgatgtccttgccaatgagtttgggactggtgaagtctagagctccttggtaggctttctcaacgtcgtgaatggtgccgttcgggattaagatgctgtctccaccaacgaatcgctgcgagaggggaagctgcaaggtggtatccttcaacacgttgggttctttgaacgcgttcaggttccagtatatgtggttagacagcatgatgggggtcttctctgtaagagagagagccaccagctttgaagtcaactggggaagacccttggggttggccggtgtcttctcggtagacacgctgaaagtagcatgggtaatgacgtctcctgggaacttctcaaagccttgatcgaacaaggtgaaggtgatagaggcatcgctgtgcgaagtgaccgtccagttgcgcatatcatatccggtgaagccaccatggagagtgtccacaccatcgttttcattctcaggaacgtggtacgtgttatcatcaatagtgaaggtaccgttcttgatacggttggcatagcgaccgacaaccgctccgaagaacgtgcgattggtttcactatcatgcaggtattccttggggtcatcgtagccaacgatcacatcttggacgttgccgttgcgatctggaactagcaaggaggtgagacgcgcaccatacggaatcagcttggcagtgatattctcagccttgatcgtataacttttgaagtgatcggagtttgagtcactagcaggcgagggaacagcctgagacggcgacggtgcagcattggccaaggcaggcagcccatacagggcggctgtcacataagacttgaaatgcattttgattcccaaaagagttgtaactgaaagaaacaagataaagacgaggaggagaaaccgaagcgtaattcggggacggcaaactgatgaacgtagccaaccgcggggtgcaggcatcttatgagaagctccgttcggatcgcaataaacattccccaatttgcgctaaactacctccgcatggctttgacgctagggggcggggacatggacagaaaccggggtaaaggttctagagagaccaggatttatccgaatgcaggtggtgtgatcgatatgcaggtcaaccattggactgttgggcaaagcggacgccagataatgagggggaagatctgagcccctattccggggtgttgggggatgtaacttaagggacgtgggtccagtcaagctcaagaggcgctctgccactgacggcacggaacaaatgcttcgctgagtccatgcggcaaaactccggtggagttcaaattgcatgttcaccgcccggagttgttagtcagcgtcctacccgtccacctttccaacttgggttagttcctgccgaggtaaccgtggaaggagcctctaaggttccaaggttcaatcacggggtaattccatttgatatgttgtttattcttaaggttggctcccaggaggaacttgccttaaccttatagacatcccagtcaggaatttatcaatgtcagccccgttctgagagttattctgctctcaggctcgggcgcactcacgggaagtagttggcgtccatctcacctagtatgtcgacgacagccttcgtggtataaatcttgacaggaatcaatccgtgagtgtgatatgttgtatattgtccagatcatctcatgctcagacaatttgagccccgggttgtgcctgttcattccctttgcaaatactagcaccttggcatagaaggggtcaaaaaagaatgtcctttcgtcagtcacactattttcaattccgccgtagccaaaacctcgtctatggtgatgtacgtgttttgcagtctcggcgtcgaactgggtgtagatgaagtataccttgtttgggccagccgctgccacgtatggagtatccggcgccacaacctgaaggccatatcctggcctttggtacgtagcagatattccccatggaaagttaatgagccactgagccctcgcatggtaggaaagcattcagaaacatggtgattaatggtagaaagagtatgtgcagtatagtcaccagttgaatatgtattgtgtctatttccgtgtgtccttctgcgtatgtttcttctctcaaataatttagcggtcagaggcacgtggtagataattactgtcccctccgacccggagtaccacgcctaccagctgcctcgtaaccgaagagcccgtgtgaccccaaattggaccccaatagtcatcctgcgcccgtgatcagccgcagaagtgttctgatcactgcgggccgacaattggctatccgcagtgggaccacacgcagtatgctggccctaatgacatcgatgataacgggttcaccatcgactttgggtttgctactctgtagacacctatgtacttgattctatctggaatccttggacttctatttccgttgataatagggacagaaaagaacacagaaattgagaccaagagccatcaaacatcagactcgaataaatatagtatacaagatactaccatcagtataccataccaactcatgtgaggcagagtaccggatgccatgactagtcggagggtgatgagtggcagcttcgacttcagtggggcttcctttctagtgcaggaacatcttcacccgggtgaaagttacacatataatcttatcccaccaactggatattgtcacagtggttccgatagggccgttgtgcagttcaccacacctcgtgctctagtattatgccgatgggacttcctttctagtgcaaggacatcttcacccgggtgaaagtcacaaatttagccttattccaccaaccagcatattatcacagtggctccgatagagtcgccttgtaacccgctacacctcgtgcttcagtattatgccggtggcatcctcgtaaaggcccgcagtatagtttccatccaaacagagcaaagtagaccccgcttggggtctatagtatgtaatgacaatgaggtttaggaatataataaggtcactacgatttcccatcattcctgtatttttttcactcaagcacttgataatctacaaacattcccagaacacacgttctttcatctctatctacaaggtaagatagcccttcgttgaagacttcgttatacattagatttaatgcatggccccagaattcagacaaaatggcaattgtggcgtgcaataactgtaccaagcacagagagtgttctgcctactcaggttcgaaaatgtactgcgaccggtgtgctgagaaacttgggttgaaaacagcgaaagttgaggcaacaaagacggaaaagaagaagtgacttactactactactgggtctatgttctggtcagtactattacgtctgatcgattattgattgctatgtatactaagtcttatcagaacatgattcagggcaatgattgacggtgttaggtgacttaagatatgaatgtgtctgttttctggtttggtcgttcaattgtttcaagattgactgaatgaactgtggctctgcatcgatgaaacggatgtcaatgtctgggctttgctagctttagatcagaatttcaaggatggagagtcgctcaagtttgtaatcttccagttcttgttttgctccataaggataagccatacatctcaaactgccaggctacgctaagattattcttggtgtagcatccagaagaccgctagatctacaaggtctctgactggtatagatcctgcgctaagtaaagaggtaaacagcgtccgacaaggtgatggcgagagaggcttgcttgactgggtacatggctaggcggactatgaacttggttgcatgtaccaactagacatgcaggtaagcccaatagttacctggccctccggtcaaaagaaaacgagtcaagatgcatcgcttcgaattttgtttaaacgactaatttcggtctatcactatgcggcaactcatctcactcgcctagtcagagataccacctgtagaaagtaggggatgtgggtatggttgatttactttgcagcgtaaatttcctttttccttccttccgttacatggtattgccatctttggaatatccccaagccctgtcaaattcattccaacctccagggggcgcgtcccacatggccaactcacgaaccactgtgtcgtagtatccatcgctgggcatgtttccctgacagacatttcctccaacagcgatgttgatgaggatcctgaactcactcatcttccttgtgccaggcggcttctcggccctcatgatgggcgtgccatcgatcaaccagaccaggcgcccgctgcccgttgtttcgtcctcatcccagataaaatcgtacctcacccctaccggcgagctaatgttggggatgggggtttcgagaacgcgatgcttattccagtcctcgccgttgaagttgccccaatgcagacaagtgtggttgacagcatcgccgttccacgcttccattatgtcgacttcgccatcctcaggccacttgaaggggtctttaggcagcagccaaaaggcaggccagatacctcgggccaccggcgccgtaatcctggccgatagacagccccgtggtcggctgagggtctggtgactcgacagtctggcgctggtaaacttctgggcagggtcgggattcccgtggttgatcagagcgcgcacgatcaccgcatcgccctggcttgaatggaatgagttatgcgggctgtcggtataattctgcgattcattgttgccccatccatgttggccctgttcgtgggcaaagttggcagataccggtacttgaggatttagattgggctgccagtagatctggggttgcgagtgctgttcctgataagctagtgggggcttgctagcggtcggaataggcggtgggggattgttgtacgacggtgctggctgagggttgtcgtgatggcttagttccgcccaagccttgtctgccttatcgataatgccctgaagggcctgtctgaatggcatgttgagtacgacctcggtatggatgttagggttgcacaagtagtgtacctaggcgccggagaaaacagtaagcaaagctgacgtcatgttgtggatatcccgaaaggatcgaattcctcaaaatcccctttcacaacctttcaacatcctacttggggaaatattgctcctttctgagactggaccgatctaatcagtggacacgttatgcctccatgggctagaccaagactcagatcgtatgaactaccacctgctaagtagttagtgcctcaggcaccgagaatatgcaaaccctacaaatctctcggagcatcacaaaatttcaagatcctaatatatggcctatcgagtgcgctagaacttaacgttagtcccgtcattacccattttatttcgagataatcaatatcattgccaacacgtgcctctctgctctcttgcaatatccccaaatatggcagaagcatgccatcccccgcctgcaacagaactctctaaagcagagcgcttcaaagctacgcacctcgccgcgcgccatggcaactaccaccaatattacgccaagtttcgggcacctaccgttccagacgagcgcctttctattctcccatcagatatcctccgcgacgcgcgagtcatagacctaggctgcaacgcgggcaaactgacctatgaggcgatagcgcactgcggcgcggccgccgcagtcggcgtcgatatcgacccgtggctggtcgagcaggcgaaggcggcgtacccggacgggccgtgcacattcgagcactttgacttcgtggatgcgtccgcgtacacgggtaccgcgctgggcaagttcgacgttgtcctactgctctctgtgaccaagtgggttcatctcaacaacggggactccgggatgttgacgctatttgcgcacatacaaagcatactgaatgagggcggctatctcgtcgtggagccgcagcctatgagcaattatgcgagagcttcaaagaagaataaagaattgagagagacgtataagacgattcagatcagaccgccgtttgagactgagttgaaagcgctgggatttgagaggatattggaagttgagagggacgaggaggggtttgccaggcccgtacatgtttggaaaaaaaagtatcataatacgatcaatggagatggcttaaaatgagtcgcgcgaattgacttgcaccgggaagacgtagacttttcggttgcttagtaggtaatcaggacgaagtatatttgacacagtatttactagagaagtgacgggttaagatttgttgacagggatcccagagcagcataatccttacatggttatttggagacgaacctgggctattttggaagcgagatgaactctttctagctacattggaacctgtcaacggatatatggcagcccttttttgcccaaggaacaggaaacagaaattgtaatcttcatatcacttttcatgggtttgataaaagaaacagaaatacatgagtggttctagctaaaataagccaactaaaaaaggttaaaagaagagggccctttttgatcaatctcttaaggaaaccgggccctaattgcctaacgagttcaggagtcatttgtcgtcttagtcgaataccaagtcaactcacgttgactccattccgcaaacttagattgataagacacactgtctcttcgaaaagcctgataattggcaacttctgtcttaagttcccatctcgagagggccttaaccatcaccagtgtccggtccttgtagcttttaacatgaaccacaagtcggacaatactgtccgtgtgctgtgatggctttgttctagactgaccaacgacgaaattcgaggcgataggccatccacagttggaagaaaatggtagcaagtgcagtggaaatgatgctcgcaattgacataacgatgataacgctatctttgaaatcttcatccatagcgtgaggagaggcgaggttgaaatgggcacatagagagagggaagaagaagtaagaactaagagagagaaaaaagcagccgaagccaaattcgtcgcgggccatattctatggttggctttggacatactttgtgctcatcataaaattcggattccagcaagtatcagcatcatgttcacttcttaatatgacataatctaaaatccaaaagcactattctggatctggatgtggtatgctttctatcatacaattcaattcaagaagcgattggcattgacattggcattggtattggccgtctgaaagtcacttttattgccattcatggtatttttcaagactcgtcattgaagggtctctaaccacccgcctagtcgtaggctagtaagatatcccaaatgcgtcgatccatgttggttgtggtgtcttcacggctctgactgggagactgtttaattgttcagattcccatgaagccgcaagtaacgtcgacatccaccacgggtccctattttaagcctagatcgggtgagatctgaacagccttatggtggtaaatgatctctacaagcaaacagagagctgaagcctatcaaacaggacaaacatggcagggtattcaacatctctgaatggcttcatagtggtcgatcaggtgactttataaggtgatccgatcaaccaagaatgggtggtatgcattcacaatagtacaaccaaccattgatcttagactacatatatggctttatttatgtctttttatggttttttcatctgcttcttcgtctaattcttgtactactttttatgtggttttcaaatagaaaatgtactagttcagcaccacagaaataccatggagcatacaatagcagagtattattgattaattatagattttgaatatgacaggcaagttgaagcaattttatctacttcgtaataggaaagttatgaattggtgtcggccccggcaactccggtcatagaagtggatattcatattctcgtgaaacttgaaacttgaaacttgacaaattggcaaaccgatctctaattacttcccaaagattaaacataaacacccttttggttgttttggtgacgccaaatctcaacctcaccaccaccgcgaatcaccccaacccgcatggaagaaagcaaattgtgggcggcattggagtgagtgtagacaccaccgttgaatatggcagtagcatccttcccaatggccgatgaaatgagggttttaccaccagggtgttccttgataaagtcggtcacgtcgtgaacaacaccggcaatggcaactagagctttgccactctgagcttcagcaatgaaatcgtcccagtcgataacaggcagctgatctagaggaacaccccaatcaagcttggcgcgcttctggtcgagcttcttctgtagttgttgcacacggcccttctcgatttcgttggctcggaactccttgaggttggttgccagaccgagctgcttccacatccagattgaccacttggtaggatcgtactgccaccattggatggcattgcggtagtcggaggggaactggtcagagtttagtggatgcaaagtaaatataagggaacaattttcttacctcgtggtggaagttgtggtaaccttcgccgagagtgatcagtgcggtaacgacgtgatcgcgaggggagttcctgtcatcgaatggctaaagcgtgtcagagcgaacggaaatatgacaagaacaggatatggacaatgactaacctgctcacccaaccaatgggcgagagaattgacgcagaaggtggcttgctgcacaaacgagaaccgaagaatgccagcatatacaagaccacccttccaatcaccccatcccaggccagcaacgagcatagggaacaacatcccgaaaaccaagatgaccgatccataatgcttgtgctgccagacgacgacgggatcctcgttcaagtcggagatatcggtcctgcctttgttctttgggttttggttcagaaccatccacataaaatgcgaataccagaggcccttcatgacgctgtatgggtccttcactgtgtcggtccatcgatggtgtgccctgtgtttactgctccaccaccggatcgacccttggacggcgccaccgccgacgcatgcaaggaatattctgactggaaggacactagagatatcagatgttagtcaatgcttcatccgaagcaactagggtgaggcagtagcaggcttacgcttcgtaggatcggtgcgcccacagacgatggtagccggcagtgatgcccagtccggtccagaagtagtagagaattgcccaagcagcagtggctgccctcagcggtgtgtagcatgcagcgatgaggccaccgacgggtacgatcaggatgagggttgtgttgacccagttgacatgctggtaccagttaccgagtgtgacaggcttctcgctgatatgctgctttccaccacttggctcgggtttcgccattgtagtagtggagacgagacctgtaggtctctagtgtttatgaaattgtggggatgggagtgatggctgcgagatgagaatatttcaaatttgcggaccctggatccagagacattatttaacataaaaaaccgtctagctatctcatgccaatgggtcaatcgtcagttgcgttgctcccagcaagaaagtgttgaaccgttgggaatgtcaggcaatgcgatgcttagggaatttctccgaactctcccaccccagccctaaaatcagcaccgaatgattcgtcattgctggacccattattagttaaaagattttccattttcataattgatgcttaaatcatcatcagaaatggggagtccgtcgttcgccactgatcggaactgatccactcatctcgccggacatgacgaaaatcatggaatccaacgttaagtcatgatttttactcaacggtttagatataggtatcgtatggtcggataatggtcaggtggtagactttgctacgagttgttagaagtccatggtagcctaggtgataacatatctaagtgatctagttacttccattgaacaaacgatggatgatatattttcaagcaaaacatacaaaacttactcatccggacttgttttgtttttgatgtccttgtttgtcgggccttcaaatcgcaagccatttcctgagcttgtatagaacttcggattttcccaacatacaggatctagttccatggcgcccgatatcttgcgcacatacacgcatgcggttgttaattaggctcgaaggacccctcctaattcccccgcggaacatcatctaatttgatttaacacataattgctcgcacactacctatactccgagatgcaagtggtcgaagtgaagaacaagaatcttctgaactaaagatcacagttgggcgacctgacgtggtgataattccattctacatctcgggcaatgtgacaattggcagcaaacctgtcgaattgaaacggcactaccatacaatatgtcctttgctgatggaaagggaggaaggaaaactaggagcatgggttttcaagctcggataatagtaggccttctctgcccttgattaccttgatcaccacggagattgcttttcttttctagtttacccgttgaaatctatcctcggcctactttatagccttgatacgtattataggccctaggatgcatcgaatgcgcttcaagcgtaagcacgtgatgttagaggcccctcgcctcgcaccgcctgcgcatattccctttttgtattgttcacatcaaatactttttataccattctagaagccagccctggctttgaagcagcgatggaaccaagccacgagacataacaagcaatgagatcgcaatccacgacttacgaggaaaagccaaagaaagatacccagcaagcaatcagttctacgatttcggacggagccgaacggacaattcgatcatcagaacaagatcttgtttcagaacttagatccgacagggaaatattgcccatttcatcttgccgtcaaacaggcacgttgaacgcgtggttgtggaatggtccatagtgagtcctaaccatacctattgttacccattcctaagtatcgatagatccggtcaaatatagaaagagtagtgaagaaatttcaacggaagatttctcctgacccgagagcacatctgttaaaatggtccgatatcgaccactcaaatgccgcaccatggaaccgtgagtcggggtatccggatgacaaaacgagcataatagtctggattgcgttgggaaagcttggtgtagataatggattcatatatgaaatggagagtggccaggacatgagtctagatggccgtgaggggatacctttttctggtaacggaggggggttggcagtgttgttgttattacacatgagatgtgacattaattagaatatttggacctggatatggtgaactaacccggcaaggaatatgattatgccccttcgaaaatattagttagttagtacatactccgtaactaactaatcagctttgatttgattaagtggggatcacgtgaattgtcggggatgagcgggaggctcaaactctaaagagggttaggcccaccttcccgctccccacacttgttggttcggtggattcggcgctttgccgaaggatccagaagcgaagagacagagacacgacacggcctggatgatattggtcctgaaaagcggaagcaaaggatggaaaactatcaacaatgcgttcactcctcaacgctgggtctgagactaccgcagcgctgctcggtgccattacctttattttgctcaagaaccccagagtcatgaagaaactgaaatgcatcaagtcggctatcttgaatacaatggcatttgatcggatcgaaggtcgcttaataattaccaatatctttggaacagctcatgggtaagcctttaatatattgggtgtgttggaatcgattgtttgctgatcatatgcataaaggcaatttggaaataaaattgttctatccgccacttacatgtcgaacctacgagagttggttgacagggattgactccaatgccttcttgagaggacgatccgattcttgcaacatacggggtctggttcgccatccctacaagctgatatggagattctcactgaaatctacggacatatctttacaccttctatcggttcataagcgttagagcagccaatttggttcttcgactgcgctccttctgagtagtatcggataatttctttattctccacgatatttggttcaaacgctcgaagcacactgcctgtcttttctgattctctgttttcgaaaggccaggagaaggaagagagaggagggactacaaatgtattagactagtcgactgcactctggaaaataagagtcctggcaagtagggtcaagttaccgcaaccatgctcctaaaatatgtgggctctatcagatatgttacatgactaccctctcattctacaatactagatttacactactagctacatcaacagttagggatatccgagagttgacccagtaaatgataatttagtaacgaagaccatcgagttctcaaagaaacaagaatcaacatcccgcacaagcaactagacagtgtcacgccaatcctcaaactcccgcgtcgtcagagggaagaccgcaacgttgctggacgtatctccatcgtcccctttgaaaaagaactagacggcgttacgtccatctttagttttaagaaccatcctctccgcgacttcatctggagattgcatattgccgaaaccataggtcggtttgccacaaatggtgccaatcacaagcttcgccagttgatacttgcggagattagacgggaccttttcccttcgtcgacaagttaagataagcgacttccactctgcgctaggccaataaatacgctggatatcgggtgcagggagagactccagaaccgagttcgggatagtgatgtgaataatgacagtcgcgctatatatgctgcggcgtttagcatagtaggcataatattcggccacttctcgctcaaaagcaaagtaaatatctgcgtgtcgtcccgagaaatcagtaggtggcgcggatgtaaggcatgaaaagtcaacgctgctatcattgccgaatagactatcaatctaagcttggtcaatacccttgtatagagttttgtaccccggtgcatttgcagctgcacttgttacagcgggagacaaagcagtttcgtgtgacaaccaaggtaccaccgatatcgatcgtcatccaggtctggaagcttcccgctgactagccatatcacgcctacgagaagcttcttgtatcgcccgtagcccccggtgtcgtaactgaatagtgtcctgaacccagaacttacaagtttcggttagacggatatgttgaaacttaggatccataatagcctcctgaagctcgcggttgatgtgggggtcagcgggagatgttgttcttcttcgtcgctggatctattcaagcgtcgtttatgaattcggcgggtgccatcatatagaggagggctggccagccctgatgcctgcagatttaccgcatcgtcaggggtcagaatacttgcccagtcatccctggatataaaagacatcgtggattttttatgcgtggatgaatatgtatgtagtgtgagattccaggtcgttcttgaataagaaagagtacatttgactaaataaagaatataagaaactatctgcatacagcataatggggatcatgtgacaccttccagcaatgaaaatgccttcaatattggaaagcatctactactaagcctaattaggaagttatagctccgtgaatataatgagcccgggcgcgctcaattaaagcaattggtcaaaagtttataggaaggtcaatttcacatttgtaaaaaatgagagagaagaaagacaactgaaaagacatatgaaaagactaccgcggcaactccccggggccacattgataattgtcagatatctagtgttctcacctcaacaggtaaccagccctcacatttttctaccaatactgctttgctactgatggtattagataggaaacgccgagatgtataagctcgaggttagttgtgggaagcatggattagatggcattttaaggacctgaaatccgtggattggcagcccacttcatcacctcagagttaataattatttctatactctcatatcttaaacaactattcaatttgagacaagatacgcgatagaatttgttggacccaaactatgaatacatccaatgtcgacaaatcaactatagagtcgcgttggcttcggctctttgccacaatttgagccaaattcgaagtctcgaatatcgccagtgaaaagtggtatctgacaacttagtagcgattacaatgacggcagaatcacatttctgtagccagctatacatgtacctgatacgccaacacgtattcgaccacctctgcacgctggaagctgattcgattcatgcgcgcagcgcgaggcgcttcaaggaaatggttctttagggttcccaagactcactcctcagcatcaccaaattcatgtccgatgaagatggggaaggctccttcacccgaaaaggctggtagtgtgacaatgcaaataatgtgcgcagtatgagttgatcaacattaatatatgcgtacaataccagtaccctatacgggttatttaaatatcatcgagactttggctttgggttggctgatatcacctatgggttggtcttgtccgaccgccgggttttggacgacgtgaatacacaaatggtagtcttgccggttgtcatgggccaagacgtgccgcgaatgtcctactggcatatcagaggaacaaggtagtcgggaatctccaaggaagatgtgcaaatgcatctggtcgttgaagcttgcggtgtaacattgaattaagtgcccagtgtgaatgacgtcgatttgtactccgtaaagaattgggtcgatggcaagccgaggaaatatttcctattgtcacatctccacttatgtttcaagacacaaagggggaagagaagatcgtgtccaataatagaactccaaagggttgtttagggagatgcttacctaaccacctcgaggaccgctctttcgtaccgcatcgggagacttgtttatggcttgccccgcgttttctctcttatttatgtatcataaagtaggcctgtgaatagttacgagacgactgcactttttcattgttgcattccttagcgtgcgctcttccacccctttggtggcacgcgtgcctcccgagattccatcgcatgagtccgccatgtcggcctcgtcgcgcagccagagctcctcccccgatatcctaggtcctccgggcgatgcccagtacttgatctcatcaccgatcaaaccattcgcagggcgccaaagctggatgtctcctatggtagcgaaatcacggactccggccaagcgaccgcgaccgcgcggtagcctcagtcccgcaaaaagcgcgcattcgattcaattcaaagatgtcatactccccgggtcgccagcaatgaagtttaatggtggtcgacaaaggtcactctctccggaaaagcttcaggagggaaatgtcagcccatggcgcatccgactcacgctggaagcgacacaagacgaagatgacgagaaccggggtagcccgtcgcgcaaacgattaaagccctcggccataacaacgatgataccattaaaggatgagaggagtccattgaaggagaaaacgcagtacaagaggcgagggcgtcctcgaaagtctgacattagtttgtccccgtttgctgcgcgtacccctcgccctggacatacacctgggccggggaatacacctggaccggggcatactcctggaccacaagctggtgactctcaaccacgcaaaagaggtcgaccacggggcacgcccaggcccaaatcacaggatttccagttgctgggtgaccaagcaacgccgactatcgaatatgaccaccactttagtccgatggatatcgttccaaatagtgatgcccgtcacaaccagcaattcagtccaatggacaccacgaccaatgaaactggcttaggccagcatgaatacagtccgatggatacaatacctagtgatgctagtctgggccaccgaggattcagccccacagatgccctcactagtgacgctagccgaagccaacaacggttcagtccgacggattcgtttgctggaagtaatgcaaacgccagtcccttgaatctcataggggatgtggaatccgatgacgactcttgggggaactcggagatatcaaatgcagagcttctccatccaacagaacccaatctcgacaatactcgccgtgattacggccgaacgagtttggagacacctgttatcggagctacggaacatcactttttggatgatgagaatatccactccacgccttctaaaatgccatcaccgacacgcgagagagctatgttgtcatcgagagcttctcgtaataccaataccgctagcccccaatcgcgcacatatcctactccgacccccacatcttcgctagccgatgaagaaaatcaaacccgacaagccgactcggatcatttcacaaggacggagaccgaccatgctgaaaccgatcccgttgaagatcccgcggacgagtacgatgaattcgacactatcatggaaagtgaaggattcactatgatttcccttgatacgctcccgtcagccaagcagcacggattcggctccagcgctacgacgaacagcggtcccaaaccgaaggaagtcggagaacggttgagacgcaaacttcccgggacgatccaagatcttcgaggtgattctcgtgctgaaaaggcatccagtccagtcactacgggcctagattctgggctatacaaaattccaagcacccatattccggagaagtacactgcacatgcgatcgagcggcaatccgttaactacgtgaatgagatcgcctatcctgagctccctgccgcatcgtctcctgccaaatcaacaattgttccaaagaagaggacactcaccagtttggctaaacttgttcgacttagcttggccctacaaggtccctttaagccgcaacaagacgagtggtctggtaagagtaatgcccgtcacaaaagacgtcggttggagggtgtttttagcacattcaacgctgaaacgcagcgggaactccgagctgctatggggctaggacaggagcttgctatgcgccggatgctcgccgaggaagagaaggctgcggctatagcagcagatcatgcggctgctcgtcgtgaggaggaacgtctcgaggaagaacaaggagaacaggaagaacaggaagaacgtcaatataatggcttcaatgacgaagaatcggaagagcaggatcaggatcgaccctttgaagacgagatcaagaagcaggagcggtacatccaaccgtcacgttccagtctcaacaacttcattcagcaaagcccggtgtccccccagaaggcacagcgggaggcacaatggcagcttgagcgagaagcagtcagccgccaggctcagacggctgcaaactcacaatccgtcgtttatattgatagcgatgataatgcggcggaagaggatcggggcatcgaacctgaacatgaacaacgatttgaatatgagaacggaaatgagtttgatgaagagcacaacgattctgcacctgcacccgtgccagaaccagcgtcagaaccagcgccatatgtgccccaagactttgagcccgagcccgagcccgagcccgagcccttggaagatgaggatgatggttatgacgacatttggcaacttgaagcgaatgatcacagccatgtctcacaacacgtcgaggatgatgatgtccggtctcatccgaacccgcttgcacgtcctttgggcaatattgccccgatttccgcaggtaaagactacctgagttcatctccttaccctacctcagagcagaattatgtagcgcgcttcggaccgtccaaggtccgcgagctccgtgagcaaaaggtcgatttgtctgctttgcttgcagaagaggatacaccaaaccgcgcacggtattacaatggaacgagtacgcctcgtttactcgcccgcccgtcagggacacagaattcaccaatcaataattctgtcatgaaggatccggtatcgcgcactccagcgcgcattcgtttacaacctctctcccattccagcccggatactcccaacccacggatccacagtccacaaatcgcgttacttgatgggaagaaatctccgaagcctatacaaagcccgcctatacaagagcagttggaagaagactacgacagcagcagcgtttctagcgccgctctcggtcaatcggaatctgccaacgtggattctgcctccaccccgcaacctcgtcagctcaacaaagaggagccaggatcatcctggttcagtaaaataaccagtttcaccccgcaatggctgaaagccccgacccgtggccgaagctcgagtgttagtactattccggaggaagcatctgaattcgaagatgaagaggaaatggccagcattgaatctgcgaaggagcttgagggacatctccaggatgagccgctctcaaagcaaacgagccaatcaccggcgagcaattggagacagccatcaccatcccagtctccccagatccagcaagatcctcatcctaccgtggaagaggaggaggttccgatgaatgagagaagtgtttctcgggacctccgagaagaagagcagccggtatctgggcgtggtgtctcgcaagatccattagagaacgaagatgtagagccagtgaaccaccagaatggggcatccccagggccacgaccacttgctgtcttcggatacttttccgatgagcattacgccgcgctttgtcgtatctaccgaattgccaagcgataccccgagcactttgaatatcacgattctccagggcgggctgccatcatcggtgattggatatggacctccgatggtcatcacggggtgcccatcacagagattcaatttgccattatcgatcgctttgctcaggagcttgctcgggctgatatccaatatggtggcagcggacagatcgattggacagaagccgatctgcatcggagactcattagcatcattattggcgagcagatccgagaggaaagaaaggccaaggccaaccggggtgcttctgtggatacatggcgatgaatgtatatttcttttgcccacttctttttgtctcatgtacattttttggatatccgatgagcatttggcgtcatggttttgttttgaatacgtctgttcttgttatgattatgattccctcacggttattggttaggcttgtgtgcagcattgggctgttttggagggtttattgtgcccgtaattactttaggcgtctttctctattctctagccttgtcagttggacatgaatgtgggactgtatacttccaagtttgaccaagtgcgaaagtaccaaatcccgcaaggggatccttgacttcaactgcgaacaccatgtgtatattgcatctggagcacatggatccagccaactatggaggtctgctgcatcgagatcccttatttccccgagtatctgacagagtagggatataaacattaatcgcatgagttgagctcagtccaactcattgtacttccttcgtacccgctagtcaacgtcagcgtcaatccaaacccactttgtctcctcctaatgaaacaactgtacaaccaaaccctcaaactgtcaaaccgtcccagaagcaaacacaatctacattgaagtcccgaccaaccctgcagtcctccgccatctagaccaaccacgccaacccgcgcttcctgcacgatcgtatacttctcgcgtgggcagccaagcagaagccggagagcctcgcagtccccacctctgtgcgaggttcctgcgaggtgtccctgcacgggttctcgcccttgagagtcggtctggctagatcgcgaagtaccacatgggaggcgacaccggaacatttataaaagcaagggttggtagcagcgaatatgggcagcagaccgttcccagagacgaatatcaagtaacgtagctctatacgtcgctcatctcatctattcctttcccatacatatagtctatgtgtgtcgagatcccaaccatgtcagtcttcacaatcgtctatcgagccctaccaccgctaccgctcccctggaagcgccgaacaagtctgaaaggcaaatcccccgagctggaaatccatattgatgaaaagaatcccggctcctcagactccgacatcagtccccacgccgaagaccagcacaatggaaccgtcttcatgcaccgtgacgtccacggccccgtgcaggtagcggtgaagactcacgcacaccacaacgcacccaccccccaatcactatcatccacgccggacaatatcccgggaccggcgtcgggcccggcttccgagtgccgggtgcactattccagccaggcgcgtccgacgcgcgcccagcttgatcgcgccgttagttgggcgagtattatccgcagtcgggaccggtggacggccgagcaggagagggagcttgtgcatgcgaagagacagctggggaggtgtcagaaggcgtggagttccgagcaggaggtgtggttgacctatgtatgttggcgactatttttgctttctttttcttttttctttttctctacgttactattgtattgttccatgcaatcgagttcgatatcacatttctgagtctgagtcccgacaggagagataacgaactatgaactaatttttgtcggttcaggtccaggccctcagcgaagaaaaggaggcccataatgggtttctgtctatgcggcacagacagcaggacgatgaacagcaccagttccgtaaggcgtggaaacggcggcgatcttcgtcgggtgatgatgaggtgcagcagtctgcgatcgagactgcgaatcgattggggaggctacgtcgcttgcagcgttatagttattcagggcaacggttgggcgcgacgggatcgacagttttggctgtggagggatgatttaatgacgacatggtttctaagtgtagggttgaaaagatagaggttaatttgtattgttcacaattctggagtattctaattagtagttgaatggatagaatggactggcatatctaaatctagtttcatatcatatcagtatcagtatcagtatccaatatatcagaattccctagacatactctcacaaaccccctagcgatacaaacctacgagctcttctacttcccatcaggccacttcctaaacaaatctgccaacaaatccaccggcgccgccagaagggcagcagcactctcgaagaacggctccgtaggcgccatcggatgcgccctcgacggaacaaacatcttaatccgatccagcgacttcgtcaacccaacactctcctctttactcagcaactcctcaagcctaggcagatccacatcctcctcatgtctcgcatgaataccgaaatcgcgcataaggccctgcagcgtcggcacgaagcgcgggtccgtagacgaaatatcctggaacgctttcagctggtgcttgacgccatgatgctcgagtctgtttttatcgacgatgccttggccgtctgggagggagtcgatcagcgccgggtagacgacgagttcctcgccgacgaggtggcgggctagctcccaggtgaattggttttggaagcgggtttgctcgtctgggtctgttgagatgagaagtttgcggctgtgggcttcgagttcgaggtggtcgtgttttatggcggggaggatgcggctgtggaagtttggggctgcggcgtcttggctgaaggcttggaaggttggtctgatgttgccgcttatgaggggattggcggtttcggcttttgctcgtcgtgttgtcattggttttgggatgggggtgtggatggcgagggcgcgccggatcatgaagataagatagaagggtagaagggtggtttggtgcttgggatgttgttttgctgtagttttggaaatatctggagaatccgcttaatagaatagttataatagtcggtgatgagttccgtttttgtcatgatgatgaggtggatactagccctaagtcgatatcagtatagaacatcagccagtccatgccccagttgaacctactattcgactcctggatagtatatcttgggggagactcggagttgtattgaaggttagtttgatggagggaatccgaggtggttgaaggcaagatagccctaaagggttgccctcaagcctgtcatcgacacaattgccatctggggaagaaacaccggggataagctgcatacatcctcctcgcgaatggccgagactatgatatagattgacaaccgcctaaaaccaagttacagacttgaaaaacaaggtatccgtgtaaattgtactgcccaacataggggcaaggaacctagaaacgaagtgctatgcgtgttccccaacgcccagcggggcgaacatcagtccgaaaaagagaaaaagaaaatagtcacagaaaaagaaaaaattcaaatcccaaactcctccgaggtccatccctcacagcatagctaatatgatcaataaagggtaatccatgaccgcgacctgcggtaaacaccatccatcccatcttaacgtacatccgaaatttcatgcgcgtatccctcagtgattgcgggtacgcttgcgactgcgctcgcgttccatggccgcaggctggaacatctcgtagcccgggttgtagacggtaggagtccagtcgacacccattggggccgcgaaatccgggtgcagttggctgaagatggcaggatctgacgggtgaccatcgacctcctctgcggttggaagaggtgccgccacgagttcgactagagatgtgtcgatccaattagatggtttggcagcgaggcggctgatgcgagcgcagtcgtcgtcaacttcctcgttcatcagggcagtcaatgggggcgcgttgccgttgggtcgcgcgtggtgattggagaggacgtggtaggggaggatcgggcgggtggcgggcttatcggccagatcagccagggcgctcagagcactgtgcgcggcggttgtgcgggtagatcgggtagcatggaaattgtgactagccgtgcgcatcatatccgccgcacttggggtgccgttatcttcgtggcctgtgccctcgggtgtctcatccgcgtcggtattgttaccattcgtcaccgcgccggttccgtgatctgggcgcttggatgtagagaagaaatggacagccgccaggtgtgcctggtttgcgtgtgcgttgagttccttgtcggtgaagagcgagtgaatcgagtaggcgggtgccacctgctcctttgcggcctcggtcttgttgcgcttcgcgggggtagcatcgcctgcgtccagcgcaggcgacccattgtcctcgtccggagccttccgcttgcgcttgtgcaactcggacatgaaaccgttgcccaactcgtcgaggtcaacgcggtgacgggtgtgccgagtggtcttgcggttgccgtggataccaccagggctggcagggttcgtgatactgaactggttggggtggaggaggagggcattcgtgtcggcaatgtcgagctgctccttttcacgcatcagacgggcgcgctttccggagatattctgcaccaatcgctctcgaagggtagcagacagatgacggaattcttcttgagcgaaataagtacggaaatcacggtcccgctgttgtcgttccatggtgttgttgtagttattctgtataagaaaaaaaaaaagtactgattagcgaaaactccttatagatgagaaaaataagcaactcaccatggccttaaccaattctgcatccctcctctccttgatctcattaacatcctgcacaaacctggaataccaggttccagcgaggccagccatctctttcgcaaacttgctgccgccgccaatcgtctcctcaatgagcgaggcaatgctctccgctgagtccgggagcggtcccgtcacgtaaggatcagcattgttgatcagagtcatgtcacactggagggcgtgcaactgctggcgaaactggatgtcccggttattgctgaactgactcgtcaattcctggagccgctcctggagcgcagtgcgtcgcttgtcgcgttttgagggtgcgccgccagccccgccgccagggctgaggggcggagggttcgggtaagacattgtatgtggcgaaggtgggcgagaaagagtggtagatggcattaagttggtgaaggaagatgagatgggaggggtggatcacggttgaattgaacggcagaatgtttggccgccccggagaatagacagtgaggtaggagataagaagaggaaagggatttcgtactaacttaagagaagtatttggaaatataataggtaaatacaatggattcgtatatattatccgttttcccattttctattgttgtttgttctgatatgttcctattgatgttcctactaatgttcctcgcaattgatcacagctattgtaccttggatatctatcggtaactaagctagcgaatatccggcaggtaatactcgaaaatcaaagggactgactgtattcgacatatcgaaacctgcatactaccaatccatgggctgtatacggcgtgaagaccaggaatagagttcatcatcgccatacaaaagaccagtatccgcacctgggtagagcacctcaagttcatctttaacttctgtgcagtttcagttgagagccacatgtatctctccactcttcccgtattcgctaggccgcctccatatgtacctggagttttttcgtgttcatttccacagggatattgcccatacccgatctccatgtcatagtagctgacagtgtgatcagtgagatcatctctaggctccagatcagtctgtaagcctggtgaggcagtgagtgatgctcgggggccctactatatattaaatttagggctgagagcaccattgcttggatattaaactattttgaatctgtaaagatactgaattatataccacgctacttatgcgcccagaaaaacaaagtggaggtgggtgaatcttcatagggtctatagggtagactgttgtaactagtttagtagagacttaaacatgatcacagtatggctatctctgtattagactcgcgccgtgcaccccgctctggtcaatgttgctctaaagtgaggtattagtctcttttcccctcgaataccttgctctcattcgctaagaaatctgcactggcctgctaagtgatagagttcccctcttttaactcaaactttccgacgcactcagctgtatgtacgctgtcattctcgagccctggcactggccttaaccaatgatgctgcgtggtgatacctgaaggagattacgtgttgatctatcccccaaatggtgagtgtagtatacatgagctgagctccttcgagaaataatcaaataggcgcacgctagtgcacaagctatcacaaccctagagatattttcaagtcacagccaacggactttcagctgtatgctagaaagcccatcagtatgtgtggccgtggacagagccgcattttgagcctagttcgtaggtcaggagcccccttttggatcctgtcaagatataaatagggactgggttcccatgccgctttctctctaatccagtgcccctaagagcattttgtcttcggtggcttttatatcttcattggacatatcgccatacctccggcaggacttctacgcacaatggcgactctaattgtggggctagcaataaccgattcggggaaagcggcagccgccaaacccgttcaggatgtgtctaactggttgaggaagtggcggggactagtgccattttagggatggagcggcgccaaattgcatctggccacgctaaaccggaacgggggccgatgaggacgccaaacccgatcgaggggggcgtcggatccggcgccgtcggcacaaatggtagttgtccgcaatgaaagccatagaccaagttatgagatgagctatagttaccatgtaatttcggtgatgcctaatgggagcctaacgaaaccataagcatgatccctgcagatacggagtacaacatacatattccagtgatatcctagattacagaaaagaatgttgttaatagcagatatattcccactaaatcgtgtatatttatatccatcatcaagacaagaaaaaaaaaaaggtccaaaacgtcatataagacccgaatcgccaacaccggggtattcatagttcattcaaaatgttcacgcggggaaatggaacccccaaacgagtaatgcaaggtgcgaaaatattacttcgcaccggaaaatcgaaatccaacaccggggacacctccatgggtcccatgtcatcttttgtcaaggccgtgtgttaaaatatgctattggggaagaaggggtggtggaaatgaaaggggtgaggattcgaaggtggggattcgaaataggagtcgaggaaaaaggaggaaaagcgatctagcaatgctgcgatctaattcgttcgacgaatcacaaagacaccaagctcgataccatcacgaggctcgttgtcctcgttatagcgtcgtttgcggatgccgtcgcagatttcacttaggagcccggaaggtgtgacttctttattgcccatcatggagcaaccggagcttgtcctcttagatgcacggcggccgttttgccagtacagattgaggagttccttcatgcggggcttttcctggtggatgaaccattcggcccagagattgcggtcgaggtgggtgtctccgcggcctgcatcggtcacgtgaaaccgggaagatgaatcgttgtcgctcaatgattcacagagcgccacgatgttcgccttcatggtggcgaagtcgtccatctgggagacggatgagagcttgccgaggtagcggctcacgtctgcggacaactcattcaccaccacgagttggcggagaagggggtcgaggatggggcccaagtattgggacttgaaggttgatgcacctttcttggtcgggtacacgaagaggagggagccgccattcggtgatagctcactcagacgatcaacgaggaaagacggacgggtacggcaaaacaaatcacggtactcttgggcagaggttggagggagatagcgctcgaggactgagatgtgaacgctgcgaggggggacaatgggcatcggagcgtgggacatttgccgttggaggggtccactgtagtcatggtaagcacccacaactgccgcactggagaaaaccgtggcgttgaagtattcctcggcggcagtcggagaacgaggagtgctaggaggagagtgaggcagattcgaaaggctgaattgctccggtactgcgtgggtgacgttgatatagggtgattggccaggttgcaagtggttgtgaactgcctggaccatagaggtaaaaacactgtcggttttcggtactgacgctgcctgatcagatgtcctagggtatggaagagtctgggaaacgattttgacggcctcgccgcctgtcttgcaaagggcaagtgatgaagctggaaaagtcagtgaccggccctgcagtatgaatatgtaaaaaaaaacttaccagtcaagttgataccatgatccagccatgagccaatgtcctgctggcagtccatatcatcgtggggcccagggctgcctccagagctggaggatctcccatctgatgggctgctgaatgtgtccgaagcaccggtcgcggaggaattgtccacgctctggttatcgtccatcatagccatagacctcggatggtgggagtgcgcgtcaaacaacatcatctcggacttgggattccacgcaacgtggatatcctcttccggcggcgtggggggtaatatagcggggtattcctgataatgcgcgttccaagacggcgacggagccaaaggcctcggcccgcgagacacggtggttgaaagacgaagacgagagtcgaccgaccgagtgcgagaatccaaacggtacggcgaacctggtgaactaggcgaggaccgttgatcccacgatgggaagttcacggccacgctactcttggagagaaagcgagagaccggtgacggtcttgttcggagagacccctgtgaagctcgtcggcggatcctcccggggttgaaagtttcctgtatatctgagttctgggggaggtgtgctctggtgtcgagtttcactgttggtgggacatgcatggtgtgatcgtcaagtgtgggagtgccgggccagtactgtgcattgcatgagggtgtcatccagtctttgttatccgggcgcagatggcagcggtcatgaatcatgcgtcggatgatcgaaggatgaccaaaagatgatggccgggtccgagcgtgggagtggaagttggaggttgaggcactgaagagatcgacgttaatgagaggagggaggggaaatgattgagtcttgttaggaaaagaagggataaaagagaagaagaagaagaagaagaagcaaaagagggcgtgaatcgaatggaaatggacgggaagggaaaagtgggtaccgggtatagtatgggcgaacaggcactagaccaagtaccgggtaccgactggggcaagggctggggccagactcttcaggtcgggacagtctagaccgtccaagtcatggagtcatcagtttccacctttttacgttcgtttttttttgctgtaagggatattgaatttatatagatactattcaatacccttaatctaatagacgtaaattatcaaaaaatacaacgcccaatagcgagtatgcagcgtggaggacaagtataaaatatcgccagtctaggctttcgtcttggctccacggggctgacgatcattttcaggtggtgcaagtcgaggccagaatacctgaaaatcacaggatccgaatatacttgatactccagatgacactgcaaatgaattgctcattacccgagccagactcgagcagctctcttgcttcaacatatctcttccctaatgcggcttaagccttgggtttcacaagtcgccagtaccatagaacgcatgtggagcctgggcctggacgaggtactgaggactttgccagtgtacgcatacgatattccgcttccggtgagttgggcatcggcactcatttgccaacgcatatcacatacataaaggctatacacatataagcctaagtatatatatatagatctacgtctagcttctatatacgctagttcgcagcaagttcgcagttggaagaccctgaattcttaaccctggattcggggtggcaccatgacaggcaaccccatacatttcagattcagatccagtccagtccgatctggacgttgggaccgttttataatttccaccgtgcgccccgatctggttcacttccctgttcccatctccggcggactccactgtctcacctagagtgttgccactattaatttgaggtgtctgtccatctatgggtacgaattcgcaatttaagaatttggcatccgtggatgggacggcacatttcggtttaatatatataaggacacgtcagccgatattacttgcatatgatagaagcgcttgaaataagatgattaatattagattatcatatcactatgtgcactcgacatgatcaacaaatcacatcatcccggccatagagaccgatcgccgacgcattccatggaatatctccatcgccccgaggcgatggttacttcgattatccacggttccggtcccgattgcatcaccacagcggactccagatccgcgcagacccttgcatctcgagaatctggtctcggtcgcgtgcaacactggggagtgccatgtgtgagagatcggggaaattttcggatgccaatttccgatagccgataggctctctggacgtagattgcgaaggtccgtagatcctttctagaaccccgaatggttcaaccagcaaaaggccaacctggaaaacagccccggtctaaaaccaccgggctgagagtaagaggggaaaaaaaaaatgcatatggcagcagtcaccatagcccaacgaagctcctcatgaagttagcgaccggcgccgagactgagtcgcagtagtacagccggccagcggctgtctcatctcctgcgagcaattccgcagcgaagcgcggtatctctgctcctcgcgcgtcagccggacctgtttccgcgcgagactagacggcttcagggggatggtggagcgactgccgtagataggcatgggggtcttgcccagcgacgggttcacccgagccgggttatcgagggtcgtgctgagctcgtagcactgccggacgagctgctgcacgccgtccgtcagacgggacgcgcgctcctcgatatccggccagaaagcatcgccccagaaggggtcttcgcagacagcggtctcgagggcgttcagccagcactggaagccggaacgcgtgcccgcgagctgcgaggcgaccgtgacgaagcggatcgtcggctccgagtgcagcacgtgctggacgatgcacgccggacagcgggctgtgaggtaccagtcgtgttcctcggtgaggatgcagttcagccaggcgaaggcgctgcgggcttcgccgcggaatgcgcgttcgggctcggcgcctttctggctggggagggtgcgggcggcgatgcgctcggcttggtggttgattaggaaaagagggacgaggagggtgtggatgatatcgcggtggagacggaaggtttcctgttcggcggcggtgcaggcgtggcgatggccggcgcagaaactcggtcgctccatgccgcattcttggcggcggagctgttcgcgcattactcggaaggcttcgttgcgctctagctcgacttgctcgtgtcgagagatgtggaacggggaggccattgtggatggggactccgtatatcggggaatatggttctagatgattggatatgatatattatagaatcatatcgggaattgataaggacaggtacaggccagggctgagttcaagtagttccatcagagaaaataattcagggccacgaccggatgcgggcctggatattatatggtctgccccccctttgcggaaacgtcattagccaactgtcccgtttttggggaggccaaatgaaaagcccagacgatcccaatggacgactccactagctgacgaacactgtgcgtacgacgacgatcattggcggacatctcggaatgaagtggaggagtggagattggagagtctggccggtcgcacatccaacagcggttggggatgttgactccgtatactcctatagatcgggagacgtaacgtccctcacatggctattacatgattccatcgatattgacgaatgcgtggtttcgttgcacgtcaaaaagaacctccttatctcgccatgaccgcgttctagcccgagtcaccgctaaaaaccgcccagtggggtaacgtggcagtctggaatttcaaaagacttccaggatcgcgttggcgttgtgactagtgatattcaaagttacatgcattaggggtccacgagacttatcatccctgatttctagcccgatctctgcccaagaagaatataaaaaataaataaatgcagtaatgtcgatcgatgaggcaagtattcaaggtcggactaggactatctttcctatgctagcaagagtggatataagggccaagtccaaaatagcagtgattgacagggtttacgatggggggatacctgtccaacatggtggtaccgaggacggagcacagtgatagtgatgataatgatggtctgtaaatagctatcataacatgtctcaaacctcaatatcgtggttatatatagtataggggagcgtaactatgtatggaactcggtagattccgggttaggggcaacattaggggactcttaattttaaatccttttgtactggagactgcatatctctaccaataactatctattatcagtacggagcacggaggactccgcctagattgactccatagtgagctactccagatatctccaattgcgtgggaattagggctcggccccaacagctatacaacataccctcgaacaatcacaacatggcacttgtactcgggtgtatacctttcgcacttcgtgtcaacgtctatatcacattgtacaccctcaagcttgtaaaacaaattaattggaatgccccgaacggggcctggaatgaagcacgctagttgaaattaatgtgataatttcgttgctacaggcccaaatcaaggaactgcctcctttatgtttcacctcgacttgccttaaaatggttggaggagcgcttttcccgtttgcacctgccttgttccttcgttgttggtagtgtcaatttgagctgaaagcctttccttctcttcactctttagccattgctattttatcgcgtcttgcactgttactcgaacagaattaatcatgttgtcctccctggcattttccgtgccattgctcctcgcgggcctccaggccaccaccgtcggcgccatctcccccatttcggcggtcggctccaagttcttctacgagaacggaacccagttctacatcaagggtacctgagaaccctgcactgtaggtatcctgtctgactgactcaaacaggcattgcttatcagcttaccccaagtgacccgcttgtcgatactgcccaatgcaagcgcgatatcgtccggatggccgagctgggcaccaatgctatccgtgtgtaccacgtggatgccagcgctgatcacaaaggctgtatgtcggcattggccgatgctggtaggtcgagtccacatgagcaatccccggtaaatcatactgatgcgttgtaggaatccacttgttcgtcgacttggacacctttactacccagattgaacaggtaactccacttctctttctcttatggaccatctgttaacgatcgcagaccgcacctcactggaacgaaacccagtttgatcacttcaaggccgtgctcgatgagttccaacagttcgacaacaccgccggtgtcttggtcggaaatgaggtcctcacgacggccgatggttcggcggctgcgccctacgtcttggcagctgctcgcgacgttaaggcctaccgtgataagaagggctatcgcgagattcctgttggttactccgcggccgatattgccgatctgcgacccatgctgcagaactacatggcctgttctaagaatgcgtccgagcgcttggacttttactcgctgaacgcctatgagtggtgtggctcgtccagctatgaacagtctggatacaatatgctgcagaagaacgccaccgattaccccatccctatcttcttctccgagaccggctgcaacaccccctcaccccgcacctttgaggatcaggctgccatcttcggcgataagatgtctgacacctggtccggatccatcatctacgagtggatcgaggagaccaacgactatggcttgatcagctatggcgcttctgtcgacccggcgaccgcaaccgcaagcaacatcgaggacggcttcacccgccagggaaccccgacacccgtgtcgcctgatttcaacaacctcaagtcgcagtgggcgactctgaacccgagcggtgttgccctttccgcctacaaaaagagcgcctccagcgccgccatcgagtgccctgcctcgacctcgggtggatgggccgttgacccaagctcgccgcttcctaccttgggacagacctacaagaagggatcttcatctgaatccacagcgaccggtaagactaccaaggccagtgcgaccacttcaagcggaacatcctcggcatcggcaacaaaggaaggcgctgctcactctgtgactgtcggctcgccagctactgagcgcctgctcgctggatccttggtgctgtctggtctgctgggagccgttgctttctggctttgatttgttctccgacctttgacgattgtggccaagccattgtattgatagcatcacatatttgggatagacaacggccgactgcatatgagtcgtgctgtgttgcatacaggttatgttaactcaagtctgtctttcacgaagcatgaagtgtacacaagaaataaattattagtgaataagaaccggtcattgaccatcaagacattatcatacatctccatcattctttaaacgacataccttctatcccagtaatgttcatctccaactctggcagatatagctcaggcatggcagaaacatcttccttcctatcaaaatcaacaaaatctccctcgaaattactttcactctcactctcactcccagcatgaccaaacccgaaatcaaattccgaaaccgattccgcaaccgaaacagatcccgactccaccggagccgaagacacaacagaagcactctcccccacttcccgaacaacctccaacttccgattattattcccctctttatgactctcgtccctatgagtctccctatgacccccctcctcccgtttctccttaacacaatgcaaaaccaacagcccatccccactcccaccccccttcttcgtaatcgcatccgcaaaacccttccgaaccctccccgccagcggcctcctcgcaccctcgagatcaagcatagcgcgcacaaccagcaacatccgcggcacagcccagaacgcgcgatcggagcgtcgatcccgccgacagcgtttcagcgcgtcgccctccagtcgcgaaatccacgactggatctgcacggcgttgcgctcgaggtggaatgaggcatctgctatcccgccgccgcgaccggcggagcggttgcgggcgctgcggtggccgctgaaggaggcgagggtgcgtttgtgtaggattgttaggatgtcgagggttgttgctgctagggagaagatgtcggctggggagttggggtttggggggtgggtgtggttgtggttgtgggaatgtgggagggatggcgtggatgtggagtggcggagggaggttggggatgttagggatgaggtgttggaggaggaggaggttgaggtggacattattgagggggtgttctttgttcggcgcgcccagaaggatgagatgcggtggcggggggttgcttgcggtgaggtggcggttgcgtctgtgtgggttgaggacgctgctgaggagacttcggaggaggatgaggaggaggagaaggcgaaggagaagcgggagggggagcctgagcggccgatgcggatggctgttccttttgaggaggaggagtttggtctggtgtggtttggagacgcggcgcggctttcgttcagtggggggagcgttagacgggttggtctttgtctgcgcttggtacgtcctcctgaggggagggttttggcgggctgcactggctttaggatcaccggggctgtgggacgggtccagcgctctggggcagagtagttgtatgcctcgaggtcgttgacatgtggcggggtcaggagggagtcgagtgcttggaactggccgaggcagatgtggtagtctgcgtcgacgaagatgttggatgggcggattgcgccgtgggcgtagccgcgggcgtgcagccagcagactgccgaggcaaggcaatgcggccaggtgattaggatctggcgacgttgttctttctctagccgtttgaaggccaggggctcgtcggtgaggaatcggtataggttccgatctgccgtggcgccggtgaaaaggacagagacgctgtcgtctttcagatatgaagcgtagacggagacgagatgctcgtgtgacagtctcttcaagctgcggatctcggcgagaacctcgtcagaggagaagaaatgcggtgcgccgccgacctgcacttgggttcgcatgtagactcgacagacagggccggcgagaactactctgtccactgtatcatcacgcccgtgtatcccgctgctggtgttggtgcggaccgcctcgacgggcacgccctcattctcggtatagacgacatgttctccctccgctataccacggactaagaatcgccactgcgcatgaaagaaactggtctcgagagcgacgtcgtctccatctggggaaaggtgtagtaaatcgacactatgctcggcgatgggtagatcatcgtcgtcgcacgactcgtcgacgagcgcgaagatgcgatcgggaataccaatagcgtcgaggatcataaaaacacggccggctttggtgaggatccattccatgtaggtctcgctggtcaagccctcgccccagtccgggagctcgaagagacgcgggatgttctccggccgcagacgactgatgatgtactttttgtcgagggtggatttgatgcgctcctcgggccaccatagtgaagtttcattctgagacatactggccctgcagaaagcgtttgccgatcaacataacggggagaccctgttaatataacggaccatgtcactctggacaaagcggctgtcaaagaacatgtttccacctcaaccgtagaaaggtgtccggaataaaggacggctactggtggagggcttatcttgcaaggagatgggcaatgtccgatcaatagccccggggcatcaaatggtgtctgttttagagttgacttttcaatgcaaagaccaaattattaaagacaatccatcgcactatgtaacttgttccatgtaaagccgtcgctcagccaatctagggccccaggcttatctttgcgcggttccaaggttaccataagataagcgatcatcgcatggcaactgtcatatgcgctgctatagatctattacggggggcaactgcggcttcgcaaggagagattcaataattgtcactgttcaggggaacctgatccataatatgcaccccggatgtatcccccctatgtatccgagcgatcattgcggagagctcgaatgtgatccattgatacacctaccgcgaggattacatcatatgtttctttcaggtcaggacctcctgcacggaatcagccatggaaattggtggcgttcgataataatgccattgacaagcgtagatagccatcttgccgtcaggaaccgaagtcagcacgagcccggcagccccgaccgtttggcgccccacaatctcattttgcacgtcgccctgacccggactgccgggaaggattggatcaacatggaccggggtattctggatgaggatgtaatcagcgtaggctagcgcggataactgcacgagggggagtctgatgaacgacgggtcgattcaggacttcagccgatcaccgaagatagtgggcatgccgtggagactgaaacacgttcctgaataggatggatagccccgttatttttgcaaatacagttgaggtctgaagagccgagaatgcttgcgtgtcgtgagctaggactctgtcagattggcgggcggtcccggatgtgattgatgatattgagaagtatcctagagctatttcggaggacaccgtgattgtacttaaggtctaatttcggcgttagaaatagaatatgtgacacaagtacggagtagttgttgatagacacctccctccagtgtgttgttacttgtgtgctcgtgacttgcatgaaggcggtgaagggggttgtcggcagaatcgtgtcttgaaaggagaacccaattaggaaagtgcaacctacgagcatccagacttgtgaatatcctacaaggacactaagtgtacccagaatgctttaatcttttgggtcttacgtttaccgatgtcaaacagaagccttgggctatctggacaactcaatgccacataatggtacatattaaggggactctatgacttgatatcttgaaatgagaaggtaggacaataggtaaatgcttgaatctactctttttgttactctcatagccttagtctctatgactgcaggactagctgtctgcaacgagagaacatcagagcagaatgtcgtaccttctttctttggcaaacacctgatcgctccttcccatttcgccatggacatctcgcccatcactctcagctgaactttcccctccttctctccttctctcctcatctcatctcatacttctcaccttctagggacatccacgggaatcaaagtcatccccattatgattgttgtcaccggtggtgccggctttgtcggttcaaacatcgtcaaggagctgaatagtcgtggcgtgaccaatatcgtggttgtcgatgacatgactgatggatccaagttccgcaacctggtcaactgcaaagtggccgactacatcgatgcaactgccttccgtgaagcgattcggaccaaagccttccatcatcgtccccgcgttattttccactatggtgaaaactcgtcaaataacggtagcaacggtaagaaaatgctggaggcaaacttcacctactccaaggaactcttccattggtgcaaggaccagggggtccgcttcatctacgcctcgtccgctgtcgtttatggaaataacaccaccttcgccgagggagacttccaggaagcccctctaaatgtatacggatactcaaagatgttattcgatcagtatgtcgtcaagaacactgacatccgctccccacaagtcgtgggactccgtctcttcagtgtttatggacccggagaacagtaccaaagttcaatccctagcactgtctttcagttttacgaaaaacgcaaatctttcaaggcaattgagctgttcggagaatacgccggggtcgaggctggccaacagaagcgtgatttcgtccacgtacaggacgtcgcgcgcctgaactgttggttccttgaccaccctgagatcagtggtatttacaatgtcggcactggtgtggccagcagcttccacgatgtcgccaccgaggtcgccagcaacttcggcaatccagagggctatatcaagttcatttccttcccagccgaattgaaaggcagatacccgagctacgcctgcgccgacatctcgaagctccgtcgggccggctccgtgctgcgtttccgcgacatcgaggaagggattcggaattacctggagtggcttgaaagtcctgaggggttgctccgctaatccttgcacccaacatgacactcgagtatcttcgggaggtcatttttttattctttgaggacactctattcttcgaaacggcacgcggccgtcatttgctcctgtttgtagaaatctcttcatatctgggtacgctaaatatatttattaacatcgcctgaggatttatttaacaagacaaaggaaaggatatgacccagaatgaaagaatgaaatattcaacctgttgagttcatacctggattgagctgtggaacaaagacaaactaggtagtcataccttccatagtggaacagagattttcaaaaaactactttgctagagaagaaaataaataaacaggacatctttcagaaaaaggcgatgtttatcgcgttcaattagggagtgaataaatagaatacaaagcagtccattaggacagatgatctaagtcaattcccagctaaagtcctgtccacccgaagcaggccgaaccactacagagccgggaagacaaataaggacgaaggaaaaacacaaaacactgtgtactgtgcatatttgtagtcacaagagacaaggaaagtaaaaccacgaggtcctcgcggtgtggtagtctgctgtcaaaacgcatctacatcatcaagccgaagaaagcagcgagagaagccaacagcaggctggaagcgaccgacacgctcgaagccgcgttgaagatcggagacgcgctgggcgagacgactccactggcgctgcgactggcgtacgcgtacccgctcgaagtagcccatgttgcggatgcgggcgcgggaacaacaccggtgtttgccggggaagtgccgctgggagcagccgggaccagaccgatggtcggcacagcaccggccgtagagccggtgtttgtgacgaagctgacctgcgggacggtgacggtgtaggtcgagtaggtgattgtggtgacggggagggcgggggcggaggtgatggggatgacgacgctggcgggggcagtcacagtggcgccggtgacaccggctgcggatgcggggacggacggagcaactgtcgggatcagggtgattgttgatgggatggcggttacgatgcctgggttctgggggacccaggtggcgcagataccggtgaagtaggagagggcggattggatctcggacttcgaggcaccccaggcttggatgcaggagatgactttgctggtgaactcgctgttggggcagaagcaggaggcgtcgctgttggatgtgcacttgggcgcgagcgagagccaggtgttgatgcactggggtacggtgttggggcagggagcggagggagcggggctcgatactggggacacgccgctggggactacggatgtagattgactctcggtggcagcggtggcggtagtcgcgatggttgcgacggaggtgagggtcactgtggaaactgtgctggatgtggtcacgaaggtggaggagcccgaggtgacggtgttggtcacggggcaggtggtctcggtcacataagtcacaacggtggtagtggcaccctcgggaatggtgggtgtggagttggcactggtgacagcgggagcagtggtggcagcgacacctgtctcagagggagccggggtgcttcccgcagcgacagagctggggaggttggaagtcgaggtcaaggtaacagttgaaaccgtgctggatgtggtgacaaaagtcgacgacccagaagtgacagtggcagtcacaggacaggtggtctcagttacataagttacaaccgtggcagtcgatccttggggaatagcaggtgttgtctcagcgctcacgccggtgggaaccaagctagtgacatcggagccggtggggaggggactggaggcctctgcagacgaagaagagacagggcttgatccctcggaagttccagatgggaccaggctcgaagctccaggtgtatcagatgaaccagtgctggaaacgacaatgatcgagacaccgggggtaccagacggggcaacagtgctctgaccagcaacggaggtggcggtagcggagcagtcggtgcagatcgtagagacactagtcatagtaacggttgaaatggtgcttgaggtagtcacgaaagtggagctaccagaggtaaccgtgttagtcaccgggcaagtagtcacagtctcccaagtaacgacagtagtagtggcctctccaggggcgaggggagtaccagcaggggacgagacagcggaggtcacgctgggagccgagggggttccggccgaagttccactggcgggaggtgatccagccgaggagctcacgggcgagacccctgttgggactgcagacagaggtgtggaaccgacttcagctgtggtagtctcggtgacgggacggacagtggttgaaacagggattgtcgaagtcaccactgtagtcgagtgtgctgggcagttggtaacagtcggagcacagctagtgatagtaaccaaactggtggtatacacggttgaggtagtcatctggaccggagtggtgatcaccggggttgaagcggctgaagttccaacaggggtctcgcccggagcggatgaaacagaagaggccggaatcgaagatgtagggacggatgtgccactgggaacaccaggaataccagccgatgagctgacaggggaaacaccgctcgggcttgggactgcggacagaggtgtggagccgacggcacctgtggtagtctcagtgacgggacagacagtggttgaaatagggattgtcgaagtcaccactgtagtcgagtctgctggacaattggtaacagtcggggcacagctagtgatagtaaccaaactggtggtatacacggtcgacgtagtcatctggactggggtggtgatcaccggggtcgaagtggcagaagttacatcaggggtctcgcctgcagtagaggaaatagcagaagaaggcaagatcgaagatccaggaacggatgtaccactagcaacgccaggaataccagccgatgagctgacgggggaaacaccgctcgggctagatacagcaggcacagagagcgagcttgtagcggtagcagtagtctcagtaacggggcagaccgtggtggaaagagcgatagttgaagttaccacaacggtagatccagctgggcaattggtgacagtcggagcacagctagtgatagtgatcaaactagtggtgaacacagtcgaggtagtcatctgaacaggtgtgctcactgccggagtggtgactggagacacagcagagcctggggtagagcctgggacagagagcgaaggcacagcggtagagctggtgacagcagagcctgggacagagcctgggacagagagcgaaggcacgacgatagaactggagacagaagtctgttcagatggaactctggtaatagcagaagtactggaaacgacaggcgcagtggttgtggaaccaggagtgcagtcgaagccaacgctgtagatgcccaaaccgcagctctcatgctcactatcgtcgggcagctcgaagtgaacagacgtagcaccaccacactggtcgttgctgaccacggtaccagcggagttgcaggaagcggtgttcttgcaagtcgatccatcgggcatgctgtagatgatgtgcaagtcggtatccttatcggtagcaacgtggaagttggtcacagagaagccgctctcatccgagccacaggagaacgacggagccgacgaggaggagctagaagagctagaggagccggagccactggagctgtgggagctggagccactggagccactggagctggaggagctagaggagctacctttggagacggtaccggagatacatttctgggtctatagcatggtcagtatgtgcagataaagagaggcatgcattactcacgccacgcttgccaaggctagaaccgaagccattgccgcaagtgaaacccgaaaaggaaaagccaccatagctggagaaagagccaggagcgagatcagtccagctgaagcccttttgctgggagtcgttacacttgttaggcgatctacccgggctagagtagcatttctcggagccccaggactaaagaatttcgagttaggatggatatcagagacgacaaatatcagttgaggcataccgctccggtggcctggccagaggccagaagggataaaaacacaatagcggatgtgaccttcatagtgggaggatatccgtaacgagtgaaagtgggacgcgaaagatcgaatggaaggaaaaaagaagagagaagacgtatgaaagaaacaaagatggactgatgtagactggataggctgcgatatagaaagctaggtctcaatagatatcgtgatataagccacaattgtataggcagcaaaccaggcaattcctattagtattgttgatgggtgacaataagaaaaaaaacctcaatgagattgggtcaatatcaaacgaaagaaagacaaggaaatgcgtatccctgaacgagcgtctttggttggagacgaaccaatatggataaagatccaaaagaaaatgaaacaatgacgagaatgaaagaagtcaaggatctgggcagggtcgcggtctttaaacaattgtccaaccaggccattccataaacttctgcaggcaaagggtctggctgcagctagcgagccttcctctgttgacccgaagtctggcgccaaggaccctggtaagacattttgtctgaaaaaaacccccatctctccaatcggcagaaatctggaggcacagatgaaactgtagtggctgaaaggagggtgggcttgggatccatccagagcttggcgccgattggtatagacgtgcagaagctggagaagagccagtcaggggtcgaccaaggcgcttgccggggggtccgatcccactcagcatcagttcatccagatgtgcctgtgagatcagtcgacattaattgaccaataagcatgacggagtaaaaataggttctgaataggcgcttgatcggcagggagaacttgcataggccgagcgttgacaggaggggtcttcagggtaaacagtccacgtgcacttggagtctttcatctcccccaaggctcttggactgaaactcgctattttcgactagttgaggttaaagatttagttcaaaatcaaataatgggagataagaaaaagaaagaacttggcgtctcgcccatgcacccactttctgcgtcactgcccacatatttgcttattattgatcttcatgatcttctgtatacaagctctttgcatctcgaagcgccagggtccacaaatcagagaatgtctatgcatatggagtattactggggtcagggactgctcgtgtcttaccggatcgacttttcttttcttttctatctcgggtcccaggggtaaacccctggaaggtcgaacggccaggtacccgaacgctccgtctcgcctttcgcttctcggtttatgtggatccgactaaaaaggcccagcgccaaacctgtcagaatatactagtggcgttgtttaaaccgaggggttcctgttcctgttcctgttcctgtttctaagcgtctcacttctgggctggatgtaaccgataccattcctatcatccgatctgaattcgaatacgtactattcaagataggtttaacttagccactacggagtacttcttcctgaactaactatatacctcggctttgaggggtataagtgtcgaattccctattgctttcaaccatgtcctaccgcattggccttctattttctctttaaatttcttgaaatggaaacagaaatgcaaatcgtccccgtctctcggcgcgtcggacgatgcctttgtctggcttaagtccgggtaacatgaaacgggcaactaaaaatacccacgaatgagacttttagcgccgcatggagaatgctacgccgtgcctccctcggaatcgtcggagtctagacgtcaagtctaggtcttaacattaatatattaacctcggggttactttgcaaattcggcaaccatgtgcgcccgggttgcatttttagtgatttcgtgcccaggcagtgtgcgttcaatgtcaaggcttatctggacatcctatttatgtctagctactccgtactcagtacggagtactccgcgtttaatcaggggcaagaaaaccgaaaaaccgacgactcggtactgtttgcagttatattcaactctacttgtcgttccatagatccctagcttcttactatcagcttattatcccgttggtggaacaacattgtaaatgtctgcggactactgagtagcgggtttcactagaaaaagtggcgtttacttccaggaccgaagccgtgttggagtatgtcgtacagatatattttgagtttagaagtagagcttctttagggtcgtttgtggcttccctaaatttagaaccaatactaagatagtagcgagattgaagattgggaaaccataatatcaacaactgtaaggttgttttatctttatcgacccattattccttcaaaattctcacgagccttctgcccaaggatcttttctttgccttgtccggatcttcaatcacccagttgagcctatccgggaaattaatgtcatccaatgataccctaaaaaagttgaatgtaagtatcgagtcttgctttgatatgaagcaacgactgaccatttagtcttgaaccaccatttatatccaaaaaacatggggaaaaataccggaatactaatatatgacgcgataaacaacgaatagttgaatggtgtctcaaataccgtgaaaccttggatcagcaataggaaaatattgaagaagaagttaccccagtagatcgaaatgtggcccggcgctgtatagggaaattctttggcgtcgatccctttcctcttcgcagcgccacgaactctcagatgaacaaatgtgatcgaagcccatgcgatgtaggccgcagttccaccgaaagaggtgaagtaggaaaacagactccctgccgttgtttgcaaggacatcaggcctaggaagccccacatatttgagaaaataattgccgggtatggcactgcacacaatattagttgttaccagagagaggatagaagaggaaattgtcttaccccccctagtgtttgtgattgcaaagcacgagggagctttgcgtttcaacgcgagagagtaaagtgtgcgtgattggatgtagatcactccattcgcagcggaaatgaaggcaattataataatcgcattgacgaaatgcccggaagacttccacccagcaagtacaaaaccaatagtgaacggggatgatgccgttgtcgacgatggatgcaccagatcatccgatgttgacggacaaatcaggccttggaaaaacgacatgccaacaaacacgaccaagatacgatagaggatagaattggtggcctaaacaaagtcagcatcagattcactttaaatgtcaccgatttaggggatgcacgcacacgaggaacgtctcgttgggggttcttggactctcccgcggcgacagaaacaatctcagttccaacatagtatgcggcggccagaacaaatacttgaccaaatccattgattccatttcggattgggcctggcagaatgtcagacctgcgaatcaattcgtgtgcgagaatactcaccgtatggctctttccagtacctgaatccgacatacccattaccaaacgcaccagtatcggcaagaattgagataaaaaatagcacaatgagtgacaggaacttaaacatgccaaagtagtattcagtctccccgtagaagttcaccccaagggtggttagaatggagaaaaagacaaagaataagatgtaccaagcccagacggggatcgtggtatcgggaatccagaattgaaggaagactgtggcattattccaatctttgaagttgatgagtgcaggccatttcttgcttgttgatgacactcacctgatgcaagaaatacactccacataaaatagtaaagccaagatactgcaaagctgagggctggatctacgaatcgatcacagtgctatatgaaacaggttagcaaaatttccagcaggttgagattggagttacttacttctacaaacccgccgtgaacaggaaagagcgtggcaacctctccaacactctgcatcaaaatccacatcgaagcacctgggccatgtcaactttgtgagaaatatgctttgcaatgctaccaactcacccacaacagaaaatccaatcaggagacccaatggaccagcttcgtagatcccatagcccaagccataaaagcaacccggtccaatgatactccctagggcaattatcacaaattgacggcccttaagcccccggcgtaggccatcctcgatgatgtcgccagaaatgtcgcgatggggttcatcgctctcttgaacttcggtgacagacggctttttcgatgtatcggcttttgtctgcggtaatgagaagtctgccattttgaaagacagccctagagtgattgatcgtgcaaaagaccgaggactgaccagggggtctgttttatagccttggaatcctccacatttattgattggagcttgaactgagcatttcggctaactcgtttagattgcttgaaccaaatgctaagctaaagctaataattgcttgtcgtggccaaatattctaccagtgagatgtttacttatatatcacgccattgaggagtacaattcgtagatatatttcggactatattccggcagataacaacagtgtaatttcacttccaagttcctcgacttcgaaaacaacagaccaactggggaacttttcacgagaaattgaactagaaaatcgaataagcaacaagcagggaggaatttggtatatcgaaaaattttcagttgccaaaagcgcctgttgtgtgaacgcgtagcgtcatcgaacatgagaatgacgggactttcaacgcgatgcaggcttgtggagcgttttgattttcattttcggagaattgtcctcatctatctcgagtttcatctattccaacatctcagcgcacagaatatgaagttttcatcgtcgagtgatcatgcaagtaacttcccgaccttggttggaggtaacaacggcagtttcacgcaacccggcacatcgttttgattccagtaggcaatcccatgtcgaagccaaccggcatatgtgccgggcacagtatccgacccgggattgtcctgccacagcgagccgagcgtgaccttgttgacgcgcagaatgaggccatgagccagcttgaacccatagctgcgcgacaaacaagcctcaacaatctcacgagccttctgttgctcgccagactcttgtttcccctcttttggcatggatagcgacaacagatcgaatgcctcctggccgttccaagcagttaactcgttgatgagctgcgacccttccatgaactcgatcgcatagaaatgtgccacgcagtaggcagggccattccagtcatcttcggcatcaaccaatcccattaccgcactcgccacttgaccttggataatatagtcggtcaacaggcgactgacctcggtggggccaatgaaagtcccatcctcttcagtgatcgtaaactcgccgcccatgagaggaactccttgaagtagcgggctagcgtacattccatccgtgctcgtcttgcccccatccgcggcccagagagcgaggagtagacgatggcagcgcgcaaaaagcgcattgttgggcaatgcggcgaggaaataattacatagactgtaatgatcctcgccactgggggtataagatagaacttcatacggggaatcggggttcgcgattgtcttgtgccagagcgtatccagatctccaatttgcatcatacccacgtccgcgtagacacctccatatcgcaacagcaacggccagcaaacaaggtctgaagtatgttgtagtgcgtaagggccagtgagagtctcgtcggcaaaggcgcgtgggaaaagtgttggatcggtaacatccaggaactcgacgatgttgctttttgaaccgggttgtcggtcaacgatccgtattgtccatccttgctttgtgaatcggcggtgccatgcgcgtacattgcgctgtgtgtaagggtgcatgttgatgtagcccgagtgccagaagaaccatatatttttgacgctggttagcggctggggatgcaacaggtcaaagtctatatcggcgtcggagcgtagatcgagaagcccagcggggatagcgtgcatcccggacggaataagatgttccattggagaaaagaaggtagaattagaagttgaggttgtgtttagtgcgagcatgccacaattattgattgacagtgtgctgtcttttatagatccgaaagttcccacagaaggatatcagccaatcacaacgaaatgatccgatgtgagcaatgatgagtcaagccctcgggactcccgaggtcccctatatccactgaagaactttctgggctcctgaggtctggttgtagaaattcccgtctggggatttgtctgtccacctgcctggacatacctattgtttggctgtacaaacttattgtgaaaaactccgctttcgattgcacacttcgacaaaagctataattcttcattctccgaggccgcacatcaatcagggcaaggaatgataagtcaacaaaaacgggaagaaagtatgcgcatggtagctgaggctacggagaacatgagtctcatgaatcacggctggtgcttgagctgcaagcgctgagggttggcgtggcagtgtcagtaatgtcgagatagtggtcggggtcgaaatcaaggatttttggtaatattacgcacgtcaagtgtttatatctataacccaaggtagggtttcataaaacttgcggaccttggtagatatcgcttgaataaggtttaggtgggtccggggttgtgggttctacatcatgaaggtcggagcttcatgagaggacggagacctattgattaatgagggccagcgagagaatatgataaaatatttcgaatgtttttgatattggtaaagataaatgtaaacagcaactcaaacagccataactcgttagagcgcaaacccacaagtttttaactccaaaggtatcaccagccccccccacaggggggggggaaaaannnnnnnnnnnnnnnnnnnnnnnnnnnnnnnnnnnnnnnnnnnnnnnnnnnnnnnnnnnnnnnnnnnnnnnnnnnnnnnnnnnnnnnnnnnnnnnnnnnnnnnnnnnnnnnnnnnnnnnnnnnnnnnnnnnnnnnnnnnnnnnnnnnnnnnnnnnnnnnnnnnnnnnnnnnnnnnnnnnnnnnnnnnnnnnnnnnnnnnnnnnnnnnnnnnnnnnnnnnnnnnnnnnnnnnnnnnnnnnnnnnnnnnnnnnnnnnnnnnnnnnnnnnnnnnnnnnnnnnnnnnnnnnnnnnnnnnnnnnnnnnnnnnnnnnnnnnnnnnnnnnnnnnnnnnnnnnnnnnnnnnnnnnnnnnnnnnnnnnnnnnnnnnnnnnnnnnnnnnnnnnnnnnnnnnnnnnnnnnnnnnnnnnnnnnnnnnnnnnnnnnnnnnncaccagcccccgcaacaggcgggggagaaaaatggccagtcaatagatatgacatatgaaatgaaaaaaggaaatgaaagattggtcagataatcaaatatcaaaatggatcgcttttgggttctgagaaccaacatcgatctttcgcaagccaactcaatatgcatggcaaatcgaactcaatcattagaaaggtagactggtctcaacgacacgtcagtggcaatatgcaatacaaccagagcgaagaacatgtgtgctcaacgcgaggtcaagagggtgaaggcacaagacactaatagtcgagtctgccaagcgactagaaacaggtaggataaattgtggccgtggttatcatatgatccttggaaatccaagagtcgtgcaatcgtgatacctcagagaggcgcggggatggggagctgagagcgacgttgctgagcatccatcagcttgcgtcgcacagcctcaccacctgcaatgctgctcgatttgcgcttgcgggtgggagttcgctggtcgttgttcttggcgtgccggaagacactggcaggacgagcgggagagtttgcgggcatgaactcgcggtgctggggaaggcggaggagcgcctggtagcggttatggttgcgacggaaggcagtaacaatacccttgtcgagatgattgaggaagcgctcttcgctattggcgggttgcgacgcagactggcgggtgggagtaggtgtacccatggacttgccgaaaggaggggccattggggacatgatatcgtcatcaaattgcttatccatgtcctcatcttcatcggaggatccattaccaaagtcgatgaagtcgtcgacgttgagagcagactcggggtcatcttcttcatcttcttcgaacgaactgtcgatggtgaagtcctgagaagggtagaatgcctcagggggacccatgacctggcctcccggggtgagatcgttgccgagagcggtcatcatgaggttggcactcgaagccagcattgggctgaaatccatctgattgggcgaggcgagtgcatcggtgtcgctctcatcaaccaagtgaagtgtagtctggcgagggctagtgttcgcagttccgggcatgctggtggcggcggattccagccagtcgtgacgagacgaggcatacgcggggataatcacgagatgcttgccagtgcaatcgaccaaagctactggcttgtgggggtctgcgacgaaggttcccatgatgggcccgcggcggcggggaatacattcactcttctcgtccacaggagccaaagagtcagaggagtcccggcggagaagggatcgagggtgggtgatggttgctggcggagggagatcttcgtctgtagtgtcaccatcatcgccttttcaaaggggttagcaaaagcaaaacacaatacgaatgaccgattatcatactctcgtaaccactcaagctggcctcggaggatccgtcggactcgacatggtagatgcttccatggccataatcggcgtcgccaaacatctcttccgattgccggcgggtatttctctggtagttttcattgtcgttttcgatcatacgacgcaattgtgggtccaggctgtcctgctgcaagaagtcgccgggtatatcgtcgtcactgtgggaatcactatcggaggacgaatcggatcgctcctcgaagtgaactcgccgggtgactggcgtctcaacggcttcactggtcacctcaggctctccaaaggtgtccatggcactgtagaggtgctcttcatcgaagaatgaagcagcaggtaggaacatgtggtcgtcgaacgagttgatagcccacccatcatcgtcaaatccagagctgggcaaaggccggttggttttctcagactccacaataatcatttcttccaacttctcgacgtcttggtcttcatcttcggcatctgtgatgtagtctacaccggcatagacatcatctgagctatcatccgagtcattggcgtcaatgtcatcattgccatcactgctgtcgctgctatcatcgtccaggacgcgtcttctcttgttgactgcgggttggcgccccgccttattgtcgcgacgacgaccataagacggggcccggactgctggttcttgttcatcgtctgcatcttcttctgaatcatctgcctcatcgctcaggtcctcgagggacgagaccgaagagacactcgagaccgatgatgatgaagctctccgtttcctatcggatggctgagcattggctacctttcgctgattggccttcggcgacgaatcgagattccgcatgatattggacttgggggttgaggggcgggggtgagagttcttggcggagctcttgggagcccgcttggaggagtatgagctctgcggcattttgtaatagacacgtatgaatggagaggggttgttttgttcttgtggacttgtatggtccttgttttttgttgttcaaatggtccggtccgtttcaggaggatccagtgataggatgaaggaagagggggtagatcttccttagttgagaggattgttgtagtttattccagaagagtaatccgtgcagggataagtcgaagagagattcgaagggaggtgggacggagtggaggagatcggagcggagtggagggggaggagtccacgggggggggtttcttttttcgtagccactaaagcacccgcagtccgttgcggacgctgtagtgctccttctgggagtttgctgaggggcaattccaacgccttcacacgaggcgtcgaaagagtaacaaatatcgtcaagtagaattgaagatcggagctgcaggactggggagccggcagggacaggctccccagcgaggcatttacagctcaacgaaggccatttggctgattcttgacgatatgtggtggatatgtagtaagtgtattaagatggggttcaataagttcaggagagtccgaagtagatcagttgcgagtgctatgggaaagggaagaagaagagcaggtcatttttttcccccaagtgggagacacttgtgattggctgcagaatacgaccgcctattcgttggcgccgctcaccgactctttcgcgccaatcagcgaccgccgaaagttgcaacgggaaagtcatgaatttgatctccaccaggccatttacttaaaattagatggttgcattgacattatattgggcattgggccctattgctactgatgttgtgcagtactggcatctcttcgatccactgctatctggggccttggaggaacatatcccggcaggtcgagtccaaacaaaacaaacctaacacgtcattcaacctcctcggcattctccccggaaaaatcccatggcgaaccatcccagtcaacgcaaaatacaaacccatacaggttgactcgagtttcgactcggcactggcagaaacggcatatcagaatcctagtctgcacggtcatcaaactagaatagccacggtgcaacgattgacccgtgcggtatggcgtgcatgatgattcatcctcggaccaggagacttttcatcgatgacacatctcgcgatgaatcatattgtttcgtatttggacttcacgatgacccgaattttcactgtgaggccacgggctaattggttcgaaccagagatccggccacttttacgttttgagtggcaaagcgctctactcttttccgacccgcttggccattttgcccgtcttccaagccgggaacctgcaggcctttttctttttttcttttcgcccaaaggtctaaatgcctaactggcctaaagatgatcagaggcggtaaaaggacagcatggccgaggctgggcgcgtctaacatgcatgagataggtccattgctctcttatctttgtcggtgaggggtcaattgtatagcccattacagttgtaacgtacacaatgcatgttctaccataacattgcggatataaaagaagtttcagatattttatatagaaaagtaaagaccatatttatgaaagagatatatatagaaacatcaacgttctaccacttggagaatactcaatatttcatcctaatatattaatagtaaataaaatagacctcctttagactatatatcccctactatatcttttgtaagtattcctacaagtgacaaaatctctatttcatgtttatgtaccttttgtatgggcataccatataaaagatacctaaaaagagaaatctctcgtttggtgagaaactctcgttatgtgggacagacccatacctggtacaggtatgggggcggtaagacggctatcttgtaatatcgatcgtcttcgcgactgctaagcccttatatttctccgtgagatatcgcccgatcaagtggtggtcgaataatttcgattataacgaagataaactcggctagccactagtacaatgctcatgaaaccttttcttctgctagaggcgctcgtcttacgggtggtcagcgggcatctgatcatgatgtcgcctgagccctacagcaacaaaaccctcaacaactctcctcttgccaacaacgggagtgattttccctgcaaattacgagatgatgcatttgcggcccctgcgaaagagactgtttacgaggttcatgggaagtgcaatccacggaggcggatcatgccagttgagcctcactgaagacctcgcgccatccaaagaaagcatatggaaggtcatcaagtcttatgaaggcggctgtcctgcaaatgtagaaggaggtctaagcggagacgccaatgctgacaatggcattcaactcgatttcgcgatacctgaagatatccactccgggaagtatactttggcctggatatggttcaatcatattggagatcgtgagatgtatatgaactgtgcactaattaccgtcgacagtccttcattgcctgtgttcaaccagagcatatagaaccaagcgcaggattatctacctatgttcatcgccaatataaatggctgtatgactccacaaaatttggatatccgattccctcagcctgggaagaatgttgaactcaatggtctggcgcgtaatattcttcctgacggtcaactagtatgcaccggaactcctgaatttggtgactcagtagccatggacccgattgttctagatcttgaaaagggtaatcattggaaggctattttatactccccgccacttctctagttagcattcagccgttaccttgctcctgtcgtgcttcccgccgtaatacaagccatcaatgatacctatctttggcattcgcggcacaattaaactggacaagtggtttaatatgaaggtcattgattgagcaaagcattggggattgaaatatgcatgaaaatttgataaatcattgaaaaggtcttcgccatactttggagttttaaattctcgagttcggtactgtactctgttgtattacgactgctttttggcaatggtaattcattgataacaagtatcataaaaggatgcaacaaaatttgtagaataacccagccacaaacgagttaatcgcacagacaatgccactctgcaaaaattgggatgaagatagaagagccgccgtacttacagtggatttcgaaaacagattttcctccagacatacacgtttaatatccagagactcactttggcccctagtccgagtcgtccgggctctagattgtcccgtagccaatagtaagacgtgattcccacgggaaggggctttatatagccagaataatcctaacgcaagatttgtaagggacttggaaagaaagcgtgtgtgtccggggggtaatctattttcgagattctctgtacatcaataggtcaagattggtttgatattgatagccatttgctgactagaacagacggaatccgtcagaataaaagtctaatttccgaagcttcgaaagagtgccaaatgctcctcgaaaggttttgcacgtaaaagcaacgtgtacagtacctggacttgaatgtacacgataactcgatgattggatgaacgtctgttattgaacttgtcttgcgactaattctttatacttaatttccaccagagtaacttctcaattgtcgtggcgtacaatttacacattcagactcctgtgtacactagggacgggactcagagctgaactttgacgtcaattgtttgaaatttgataccctcaagttttgaatagaaaccgaaaatgaaccggaaaattttctaacatttgtgttatgattgcaatgtaagcagcttgccgctagagaaatcgaaagaaaagttgtccaattacgataggcatcgccatccttactgagcaaccagacatgctgctcatctttttgtattcaaaaagctgcctatcatcgacgggctggatgggtcgcattggagaatgatgttcttatatacgatgagaatgagtttcgattcggtgatacacgattttgttcgtcaagttgataagcgatttcaactcttctggacttggcctttgctgaaaaggggttgtctgggacatcagccttgatacattgaagaggagggggccaatcacctgcaggatctctctcaaagggcgttttctaagctgatcaggcagattttcaatctcgacaggccacttatgcgtcgaatgacatttacccatcagcttgattacaatatccgctaaagcgtacagcttcattgtcgcagcatccatttcccaagcacttatctcgcagctgtcctcgatacccactggtgaatggaacggttagtaagaagtctgaaaactggggttaatttgatatgcgtacctatcttgaccttgccagactgagtgaaaaagatggtattcattgtcaaagtggccagcaccctcccgcattcagccaggtgctgaattccttcgagtatctgttcataatcagcgatcgctcgtattatgatataatatgtaactctacttactggcttgacaattgtaatgatctcactcgccgtgatcacgagcttcgttgccagaatctgggtgacggaaacttctacatgctcctaggccaaaaacaccgaatcatcatgataacagcatccaagtaatgaccggaaaatggggtgagagatgcgattcagcgttcgttgcaatccaaggtcggagaatgcttgcagctccagtttctgcacttggacaaagtctgcctttgtcttccttgtatcgagccagcacatacaatttgatatttgcaatgggttcaagtatgctccatggatcttcatgcaaggctcccgaactcgagcgatatttctcgttatcaagcgttgccgtcttctctttggttctcaacgacttcgggaaagcttgatccactgtagatgtctcggagactgaatcagcttgaaggggcggtgctttactgacctatatggtaggaggtctgcgattatgcttgctggcgctcatacttctaggcgtgcacttccaataagataaacttagaacgtcaggtcatctgggtgaatagaaactcctatcgatgagggaactgagcttcttatatacaagagcaggtacaaagacttgacgttagtcttcatttatcaaccccatctccgccgtaagtcttttgcgtaaagtttttgaggcagcatgcgcgattcaaccttaacgtcaatttgacctcaacacaaagttcatttcagcaaagagctttaacatcaacacctggacctaggtcgctagtcatgtcacactttttttcactaaaagtcagctttgcgtaaataggtgagaaggtttgtactgcgttgacagcgtgatctcaacccgtggttcatcgactcataaatgacgaatcatattcttggtcgttcatactgtatcttcaattgtactttcactgtagcaatctcaaagctcaattagtcctggctttacccatccgtacttctgcgacccaattacagcaaatcttcatcaatgagcgaaaactggtagcaagagtagcagatatcgaatgccttgggtccctgactgctggcgactgggcgaacaactgtgtaagtcatattctcttgcttcgccttttcgaaagccccacctacctccttctcatagcaacgatgggtcttaagtagaaattactggtatggtttaagcacagtccaataaaaatagtagattcgaaagatggacatttttcgtgtcattcactgatcaggccagcggaatttggagtacagtgccaccagacttcccaacacatagcaagccgtccctgcgataggcataactatccacggtcgcttatccccagttttgttcctaggaagttcattcatcatgaggaatgaactaagcaggaaagcgggaattcccatatggctatgtgtgaataagacaactgactcctaggatacgcctacgttgccctttcgtgtatcttttcgttgctacctttgcgtcatcagcccaatctttggtcaatctctgatgacacagcctatgctttccacaagatataaggctcagctttacccttgctttacgttctaacattttcactcacaagaaaggcacctcgtcaatttgaacatgacagaccagaaatcccgatggcacgcgcaaatgtcctctctcagactacaaatagctttggggcattcgctctccgactcagaagagaaaacaacgccagtatctggcccaccaaagaaggggttgctggcatccgctttggatcctgacacatttattgaaaatggaaacacgggaagatctcttgcacactcgccggatgtaagtttcgcctaatgcaaagggctgtggatggggactgacagtatcatgcgattaggctatatctttaacctcccgtgattctctatccgggtgtacagaagaggctagaattgctgtggcgcttacaaatcttctggttcttctactttagcagtggcgacgtactcatttcagtagacgcgtacggatactatggaatttgcacggttttcagaagggtagctttggaactacaaaggagaataatgacgtggcttagtggtactttgtggtacttcatatgattatagatcgacggaagcattgtattccgtcaggctggctggggaaattgaagattttattagtgtgaataatcaggcacattgaacttccctttccattgccaaggttccatgagctctatcttcctcccacacactttttctttctacaaaccacactgcaatgcgatccactcttcagtatcaaaatttgaggaggagtagttgtggcactcatcccatgtcgtgtaagcatcttcgtacccattattgtcacaagtattagtgttgtaagcggtgcagattgcaccattaggaccagtgattcgccacgacagaggcttggtcagggttcccttatcacatgaggtattagagaaacccccatcggtgtaccatccgcaagaaacatcagtgtctgacgaagttgtggttaagtcgttaatgaccaagcacgtgttctgggtggtgtcttcgttgtaacctgaaactacataatagtcaccactacagtctttctcactgtaaatggcgatagaccacgattcggttggagtaggagcggcagtggtagttgatgtcgcttttctcgtggtagatgtcgcaagtcctgcccatgatgaccagctggagagatagtcatccggatagtcagtctgaacaggccaggaagtcacagttgctatggcggcacttcctgcggctccatccgggtcagtaccgagagcgcaagtacccatagaggcggtccacgatgcgtcatccattgctgtttggttcaaaatctcgccagtgccgttggcataataatcaaagtaaccggggaccaaatatcttttaacatcaagtggtggcggaggcgccaggggaagatgtggatagatatcgccaagcttgttttggatgaacttggccaaggcaaatagagccatgctgtccgcattttggatcgtccaatccgcgaattgggtttgcacacgcgcaagacccttattcaagtacggtgcgtatgccgtgacccattttgaacccgtgtcgtaattgtacttcatcttgatatccgtgacatgagtatttggaccccaaccgtttgctaaggcaacccaatcaatgtgtagaagctcatgcatccacgtggtagcctgattcccattgtagttgttcatatcagcatagatcgccggtgtgaaaccagggtttgcgctttcaagtacggttttgagagtgggttgaccgaagtatggtgggcagaaattgatagcaggggcagaaggctcgtcttgatcactgttgactgtgtatgccacggtttgggtatcacggccgcatgaacaagccaggtggggatcatcacagcgagccacaattctccagtcccatggcattcctatccacccaggctgaattgtggcaagattcacgtagatatttttgaatctttcccgcaggtgctggttcatagctggtgcgcccagatactcgacggtagctgcctcgttccagtttattttgtcatcatatgcttcgctcatcatgtagttcataatctcccaggattgttgccaccctgagtagatttccttcttctgaagtgggtcacaaccatgccagccaacaagcttggaggcgagtagagtgagattataggtctcaaagttagatgtattgtatccgcttaggctcagagcagccgtaaacgcgtcctccgcggcggtgatgttggaagttgcatcggcttcagcagcagttaggacaaaattagtcaagtccaatgcccactccaccgttccgagaaacccataagaagcatagcggttgatgcgagagctcttagtgctatccttcacacgtccgagccacaggtgatacgccgagtagctgccaatattattggacgccatcaagacccctagggtcgagccggagattagatactaaaggatctaaggcctcaatatgaaatagatcatatgaaatcactacattcttgactaaaaaatcaacagtagttaggtaatatgtctttgatagaagacacccgcggcagcatacactctgaccgaaaatcaaacaaccacccgtcaaggaaggtcaagaaaagggcaatatttcgggttggcgtagaaagttcctcctagcctttcaatcactaagcaacgctcctccatggtacgggcattttgtagcattgctccacctttcttactagcgccctcttttgttgtcttccaaacccacgccccaccatccgaagtccaaccgacccgaacataattgttagacctttcatcaagcatgccggacattccactttcaagccatgctaattcggttggccaccaagtcgggctaagatatcgcactattaggagttagaaatatatagcgtcctaataaaggtattgtttgatgtaacttactacgatcgcaatgtgcattctccttttgttgccagttgggatcggaatttgttggacgccttgggtccaattccaggaactctatctccactcggctagagacatcaagcgtatagattccgccttgggagggccatcctttgacagtcacgccaggaccagacgaataatatatccagaactgcggctctcctagaaaccgatcctgaggggtagtccattcgctgctcacttcttggagcagttcctggagcgcgtcctggggcattgtgagtggaatttgaggggcggaaccctccggcttaatttgatagcctagccagccagctgtaactgatatgagcagtgggatcacagcccaccagttcaacatttcccagttttagagagagataagtcagaagggacaatatcagggttctgggatatagatagacgtgtgccctcattaaagaagaaacataaagtttaggcagagatgattgcagcttctcagtgattcaagcaggcaaccgataagtcagcaggtttcgctaagataactctaccgttttgcaggtcgttatgttgaggagatgcggtgttcaatgaaacgtgcgatacagaactccgtgcgtgccggtctcgtattttgttcattactcttggcattgtccggtgtttcaatgtgaaggaccctaagtggggggcgaggctgcagacctcgagagtgaagtggcaaaagatttcctcaccaaaaaaaaaaaaaaaaagggtctcgttaccggagacaagccattctgtctaaactcaatatcaagtagggtttgtccagctcggtggtgaattacgttatagattaacgtggggtagttagtactccgtcaataagttagcgagacaccctaacatacatacaacattcaccctcgaaatgtgtttgattgacataatatgtgacaaaataccatttgcaatcacagaagctgaagcgatctgctagattatataagtcatcggacccccagccgcatcactcatcaccaacagcaccagttcgcataaaaacacccatcagcaatcataggcacaaggccaaagcgatacaaaatgactcggaaccactctatgacttccaatagaggtagcaaagaatacaccagcgtctgcacattttttgtgcagttcctccagtttgcgcatagtctccagggaactctgctgaacctctgaaggaccgtaaccttcaagccccaaggaagtaaggcgtggcagacaatttgactctatcaagcggtcgatttgatcgacggcccacccgagtagctcgttgtggcagtggcacagatacaaagtctcaagggacggcggcaaaatcgccatgagttcttgcgtgggctcaaagtcctcatcaagcttagcaagcattgatatagaaatatgtagatatttcaacatgttgaaatcggcaaacgatcccatccatccctcatcgtcttctgggggttcgtatgattcgccacagagccaaaagccttcaagtgttgtcttgtgaagggagatagattcttgaaggggagccgatacaatctcaggcccatcggagatcattcctccgccaatattcaagcgaaacgtcttgagagccttgcaagattcaatccagacacggaagccacactcagtgttggtcatgtcgagatcaatatcggtgacgtctgagaagggaataatgcgggtttcttcctcttcgcgagcgttgtcgacgatagcgtgtcctccaaccctgcgcatggcggggaatttgaagaacggatccatgaggcttgcatggatggaattttccgtatcataccattccccgaaagcttcaacgaggcgagaaaatgccgtggtatcctctcgtgcagccttcacgaacatccccgtaacatattctgacatatccgggtagcatatgctgattcgtctcaagcctttcagctggggaaggagcaaagccaaccaagcgtcggtgtttccgagacgcagttgttcatgcggttgcttagaccaacaggtaccagcgacaaatccgtcaaggagttccctatcatattcataatcaacgtcgacttcttcattggcgtcctcagtgtcccagtaccctagccgtatagatcgtactgcatttgccagctgcggacgtcgcgcaattgcattgacaagtcgactggcttggccaatagtatgatgggtacaattaccaagaataacccgagagtagagcgctggtagcagaactgtgtacagtcgacgacatgatcgaatcagggaacagcggtcaccctggaaaggcagttcttccgcaatgaggcaaagagcctcctctgggaggtcgagaagcatgaccatgatgtaagtagaaggtttcttgagaaagaaaagagatggtagttgggttcaggttcggcgaggaggttgctgtgtagaatcacgaggtgggggcgataattgtctacagcacttggtaggagacccaaccacggccatagtactccgcatatatactcggtattaagagaatatgagtgttggtgtggtcaccaacacagtgagcgctaagaaaggtgatgcgggatgtttgacagaagaggcaacaagtggagactgccaagagcaactatcaaaagaaagcgcttagctgagcggttcagtgcatgaaatgcgaggtgtatgctcagtgagaccgaatgatattgattaaattaaaataataaaaaatcaacggaataacccgcgaggaggtctcatttagcaatccctggattttgggtcgcccactcaaatccaagattccttggttggtgggatcaacaaccatggttccgatcaacactaaccttagccctagagttggacaaagctcacaaaaggggagatcaagtgccgggataaggagtaacattactaggcatacgctctgttttggcccgaccaaacatagacagacgtgatttcgaccgggttggaactgctggccgcgtactttgttgggtatcttgttgggtttcgctctccacttccgcgggaacagcggattcgacaggagcggcgcgggcctcctctacctttatcacgcctttgcgtatctcatcggacgaagcgcccggtggtgcggtcgtcgtcaacgtctcagtagggcggattagaccctcggaagtatcttggttgagcttgatgatctcttcctccgtcaccagacgctcattctccaaacggacctcgcgcccgcgtttatggcagtaccacagcacaaagaggaggactggagaatgttagtcagccaaaatactattgcacttggtgtgatgcttcacttactgaacaatgctaaagaccagagcacattcatgcccataaccgccgggaaccgagctcgcagaaacgccatgatggatcgcagcatgcctacgagagcagcgggtttcgacacaagttcttttagacttggcactcccattttttctgcaaccgcagcagccttgcccacgttctccacattgattccactcttaacggcacggtcggcagcaaccgccagcatctctggagccaaggtttcagtccaacgctcaggaagtttctcgatcaatttttgcatgggactaggcagcttcgtataggtgtcttgtagttggcgattgccgttcgtcagcagcatctccaagtcgtgataggcagttgggactccattgatcagatccttgaagatgagcttgaacttgcgtaaaagctcctgtgtctcctcactgatcgaaaacacacggttgttatccgctgccagattcaatctgtccaaaatatctgtcacgtcgtcggcgtcgttatctttatctgcgttcttcccgtttgtagacttatccgatgtggtcggaggagtcccggcttcggtctgtgatttgttcgcatcgtcggtgtctttgtcctatttgcgcgaactcagatgttagtacacactcaaaccagatgcaaggatccgaaaatgaacacgattaaataaatgaccaaccttctctgtgcttttcttccaaaacatggcactccatcgtttcttcttaggtggaggcttcgagacttccgatttcggtgtctccgttcttgtcagtgtttgctgggaactcttccgttcttgcctaccctcctcgccaagctcctttgcaaactcctcaccaggcgaggtaggtagagggatattttcggctggttcgcttatcgcaggttggagggacgccccagtaggactttcggttggtgtttgtttattctgctctgttggaggggtaacagattcaggctcggcggtgacttcgcgtaggtaggcttcatcttcaggcgtcaggacaggcttgggcgcggtgatcatctgtgacgaacgccgtcggtgttttatttggttgaaatactgcatagccataatggagggtgtcaagataccaaggacggcagtacgagcttttatttcctgttcctcgatgagaggtgcgataggaacaaagcaagctgaaacgaggcgggcgcgtgctgaatgtaaggggaagcgcgcgctgtagattgtagtgatagatcaactttcccaagtggctacatgatatgtcagatgaaataatatgatgatcaggagatgttgcagctagccaagttgtatgctaacaccaagcttttatttgtgcattcgagcctgttcatcgcgatgatatcactggtggcttccccgcatgtgccaccgcatcactaacaccgccacacgtgctccatttacggactcggctcgaatatccttaaaagagctcttttcttccactctgagaattaattttctggcgttctttatctatgtgtattttgagtggaaggttgtgagtttatttattcaggtgcacctcgctattgtactttagatggagctattcatttttatgtgctcgtgcttagaaaaatccacgtcttcatttgatatcctaggtgttgaagtcaagatgaaaatgacggatctgccgcctcaaaaaaacgcatcacggccattgtgattactgggtaccccatgatcacatcatgcaatccagttttcaagatttcctcgcgaataaccccgttctctgttttccattccatcatagacccggcaactcccagatctgctttcgaatcaagtttcttttgctcaaggtcgtcataactgatctccgctggtatcgcagcattcaccgcgtgccaaaacaaaagttgggaatggtgccatggaatgtcatagtcatcctcggcgtggattatcgttattcggtatttctctccgttgatctcgttcgcccggatatattgcgcaatagaatccttgctcggccatttgtctcgaacgaatcgctgaagatatttgaagaggaaagggaacctcgcaactggcgacaagattggcacggtacccgcgactcgataggttgagaccaatgtcgcgacgtccacaaatggcgcaacgagcaccgtgcctgcgaatactattggtggatcctgcacagcaagatgtttggacacagcgatgctcacggccgtacccatcgattgagcaaagatcaaaattcgagatggagggatgcctgcaacatccattgcccaatccaccacggcaagggcatcgatgatgagcccggtttcagatggtgacccggtactcttgccaaatcctcggtaatcaaaggtcagaacatggattttcccgggactgcccgctgacagcgcacgataatttgggacgcggtaacccgaggcgacggtccccccagcgccgtgcatatgaagaatcaaacgagcctcagggtcatcccgcaataattgaaatcctagccgagacttgatgtcggacacaaagcctactggctcttcgacaagaggcatttggtgcttgcgatataattccacaggaagaatatgccaagcgtatagccattcaccgtccgtcgttctgatggagaacggagtgacctggttcttcaggaatccaaacctttcagggacattgaggtctttgaaccatgtcgcttgaatcgcgtggagataaacgacatgtgattggaaggttgatgtggtgagtaaccctaggaggatcaggtacaacccaaccgcgacaccgactggtattgacgcatatttaaagaaagacctggctatgtcgccaggtgccatggtggatcgaaaagtgatgatattatcgcgataagacagagagtatgtctcaaaagtgacggctgacatgcagacacaatcacttaagacatgcatgatgcgcgtgatgaatcgcgtattacactgagtttattagcgtataggaggtagaagagcgagatgttggatgcaatgccgttcacaccaataagacctgtcccgtagccgccactaaattagggcggtttttattgcaaggatcagaccaactcccttaacactgttcattttcctatcggttgttcttttttgcttatttgcgtaatgacgtgataggaaaaatcgctaattcttcttgttgtatctaacgtccgtcgagatatgggcgaagcccgtatctacgacctcccatagggtatggggacgtgctaagctatggtattataatgattgtgcgcatattgaaagcaagttctttaaataaatgatccagcaattttaccggttagctgctcgtccttttccgacctgtgaaatggatgcaggaaaaagcgctaaggacttaggagagtaagatgatacattatccatgctagccaggaaccgtgtgggatataagtgatgccgatagtcctggaataaatctatgacatcatgctgattagaacatctattgatataccagatgccttcctagtgccccaaagaggtaaatagcttagactcctgcgcaacctctgccggactaccggagcggatgaccttcatttttataggctacttatatggaaaattaatgcgaaatgagagcgcaataccggagaagaggaaaatcgtcatattggctgcccgatcgagctaaggtattttgatagactgttcgacccttgatgctcgcgacgatatcttccataacagacctagacagggccatgaggaataggtagaaatcaacggaaaaaaaaatgggcggcgttcataataagatagagcgcgattccacacgcagcgagcaatgacagcacggcagctggaacagaaaagcgtgttattgcgcccagacatggacgagagcgacgagctcaagaattgcaaaggtacaaactgctccttagtcaattatgagtcatcactctagaaatatgttacagctatcaagtataccggcttgggaaagtgaaaagtgcccatcgggcatgacgacgcaatcaaagcgaacaatagctattcaaaaaaaagtgaagtcaaaaactctccgataggatgcaacttcgggaccgaaggcctgtctgcggcgaaagagcacgacatgaagcatggccagaaattgtgtcttctccatagaaagaggtatgaactgttgaaagtccaattgagaaaagggggaagagattaccagcaacatcctacagcacatactatacctatttcaatcaaacggggaataatgcagccacatttcctaaataggatctgactgggaccgttccaatgttctaaagttccaaggctgagccaagccctgggggttcctgtccaggtgatgctctgatatttgtgaatctgcgattggcgatttcaactccgtcgcccgacgatctttcttggctcgtctacctacatagacctgtatgtacatcatgatgccagatcctcggtgtagtgggtgcaatatgtcccaccaaattcaaattaaccgccagattagagattgccaaaataggaactagaaaagtaccgccgaatctgttgtccaatttttcctactttcgttggggatgaggtggagagaccccgaaactagatgccacgaggtgggggctcaatatctcatgcaccccacaccgaccctgtcccatgtgacgcatccggggtacgttggtgcctgaagaagattggaaccgaggcagtggttctgcactacggcatcgattccgccctcgttgatctaggatcaccaaccttataatttgataatcctctatagatattctggctcttgggcacatatgtcgggatcgagtatatccatcctaactctagcaagcgtgcaccttatgtagtactaaataaaattggcgaaggtatactgtaatcagcaccaagaggtgactacctcgggattaaacctcgtacagaacttcgcttctgcattgacgctgcatattttaatttatttgacattttgcatcttctaatctggctaaaaccccgcaatgccaaccagataggttcccactcccgaaccctaaactactccacactatggtacagcggtctagtagctagtgcaccaattcggatatacatacccacagcatagtttgcaatatgagttattttataaatcgaaatacaccaatatcgcttcactatgcgtaatgagttcctggctccgtgctctggatttcctatttgggaccatccccgatgtaacccacctggcgcaattccaactcctccgcggcataactatagtgtgaaaatatagtgacagtgagtacggggaaaggtttgaggggtagttgaagcattatttaaagagcaaccaaggcagtttttcttttttctttcatccaaaacagcgctcaagcagccttgctaaatatttcaacaacgttctacaaaatacttgaatattgttccaacatgttgttcaacagtcaatccttgcttgtagggatatccttgatttctcaagccctttctgcacctcttttggagtcgagggcaactgctggtgtgtcaatccaccagcccatctctgttagctaggcagctctaacctcatctcaagccagcgctgccttccctgatttgcaccgtgcagcacagctttcttccgctgcttacactggttgtatcggaaaagccttcgatgtcactattaccaagaggatttatgacctcctgaccgacaccaatgtaggcgtggtatttgctttttacgctagcaaatgactaattccaatagggattcgttggatactccacggagaagaagaagatatcggttatcatgaggggctcgactaccagtatggacaaattattgattttaatactaggtcaccttgctaattaatccagtcgccgacatcttgaatgacattgatattacccttgtcactccctcgctctcgggcgtgaccttcccttccgacgtgaagatcatgagaggtattaacagaccttggtcagctgtacacgacacagtgattgtcgaagtcaaatcactcatcgcgaagtacccggattactctttggaggcagtcggacattccttgggtggttccctcacatacattgcccacgttgcactggctcagaacttcccggggaaggcactcaccagcaacgcacttgctgcttttcccatcggcaacgaagcgtgggccaactttgctagttctcagcccggtactttgaaccgtggaaataacattcttgatggtgttccagtaagacatggttgaactttagatgatgcaatgaagtggctaaccgtagcagaacatgtacgtgagcgggcttatcaacttcaagcactatggaaccgtgagtgatcctatcgagggcttttcatactaatatccaatcgcttaccgaccgtgaccatacataggaatactacagcgctggctcgggggccacctgcgtaaagtgcgcaggggaacgagacctggcctgctctgctggcaatggcatgtacgctgtcactatcggtcacttctcgagctttggcattacgatgcttactgctggttgtggcctgttttgagtaccagaagtggacacaactgggcaatatatgatatagatcgcttattttggggacaaagcgattttggatgattacttcctcgctggcgagggatgacagaaatatgtcaaataacctaacatgaccagtctcaatatatatatcatttgacgtcaatcacactctactatggcttgttaaaacagaggtaagtcataacggcgctcttaacaaagataccacgtatattttcattggttcagatctagcgcatgacgtgagatttcaacaccaatatgcacagccctggagggttctcaaagaaccagccacacagaatctcacttcagcctaagcctcaataacaggtgacttcgtccctagtcacatttgatatcacctgacccccgcattaaaaccccctcttcccattttccttccttgttttttctctttcctcccacgcctgccggagtcgataacttttcgctaagagagtcattccagattctcgaatgcagagccatcccagaactgtgtattcctcgtcttttaattaaggcacggggggaccgtttctgaggggagcttccaagactcacatgcttcgtgtgcatgactagcagcgtcaatctgtatttctttcgaccaactcgtatcactccttctgataattacaagattatttcgtcattcctgaccgtcttctatgggcatatatcggcaataggattactttgcgccgtcatgttcaagcgctctttcgtatctaaggaccgggcgggtaaaaccgtcaaggtcgccaagaagaagtacgacgagctggttaaggagaagatgaagcagaaagtggaaattccctcaatgggaaggtgtgtttcctttttatatataaatgcggacctacgctctccataaatatcgacatctatttcatgtgctgatcaatgtatccctatagcccccttaccagccctatcattactatgattgttggccgggaccagcgtctcttcgccgcccatgaagatgtcctatccgtgtcgccgttctttagtgctgctttgaaggagcagtttctcgaagacggtgccaagcaactgagtttgcctgacgagtgagacaatcctgcctattcgattgagcaaaaacttacacttgagatagagaacctgagattctgtcgtgtgttctcgagtttttgtacaagggcgactacttcccgcgtttgttgcgtggaaagcagagacactcttggtcactcgagaacgcccaggatatcaatcagactggtggccgtggatcgagcgagccgacaatgttccactccggagtgggagatctcgttctccgagacacagcagtgtactgtgctgccgagaagtacggcttggaagaactcaagcgccttgccctccgaaagcaaggtcttcagagtggtattccagccgacgtgatcttgcgatccgctcgatatgcatatgacaacacacccgagtctgattcccgactgcgcgctcattacctggctcttatcatccgcagtcgcaagactttcaagagcagcggaaccttgcagatggagatggaggaaggaggcaagttgttcttcgacctgtttgtggcgatgtgcaaccacatggatgacctgtcggagctgcggtacgattcactttctccttctccttctccctcaccctagctctctgcatatccctccgttactgctgactgctttttctatcccgagtcctgagcgcttacactcgtgtctaccagcaccaagcgatcgccgaggtttttctagacggttgtaacatttcctatgtactggatcgagcgactggactatgaaattgaacaagaaaggcatgcatattttgcaccagaatgacagcgaccttgccctagcctgcgtttttgctttgacagcagcttgaccttcgcttctctcgaggttggccgccctttttggattgaagaaccgaccttattcgcttttaatcggacccacgacgtatgttgacttgcgttcgaccactctacactccttgagattgagttttttcgacacattctttgatgatttgcacttattccactgctcttgtttgcgacagtgattatgcctttgtccctaatcaggcgatgcgttcgtttatcgcctaatttactcttgggcaaggcgcctacttagtgatgagaaacagaaatgaagaaatttggccacctcaaacaaacaaattgtagaagcatttgccctatgcatgctaatgttgtatcccatccccaaccatttttggtcttcagattattgcaagcgtttgcccattgatgcactgaatcgtggattgattttaggttttgaagcagaaattcactacgccctcttcatttcaaggaagggaattggtgttgtgaataaatgtctgctaatttcgatagttttattttccaccggagtcgctttcagacatttcgcacaaccattctcggacctttatacaaaatctcgaccccaaactccttcggagtcctctgggcacatttcgtcaagcgttgttatgaccgatagtgttcatccaaggttatttaatgttgcgggaacagacaagtttattcctatgcaataaaagcctgtctgtagcacatcagaactgcaggctaggtcagtattctctcgtatatcaattgaaagctcataggcagcttttaagtccctgattacagtcattacttgccaataagattggcttcgagtttcttaggtgagtctcggaaccctaaaacaacctaggcaatatccaggatttggggtctcttcttcacaacgacatgatttcttaactctgatatacaacctcagtaaagaaaacctcggggttatcgccaagatgatatttataaagtattgattcaattgcagtcaagaaaacgtttattttctacgacaagaagctctcgcccgtcgcttacaccgacgcattattaaaccgcgggctttgcgttgttctcaacgttgatgggcatctcaatatcacttcttctctttcatagtccatatagcctctacctgtgctagcaaaggcaataccatgtgagttatctagccctcattgcaagctgattccggcgacgcgaactacatctgcgagatttctgaccattcagtctgcgctcagaagcctgtttcctcttcttttaaaggtcattaatgatatctagtaccagctgcaattctttaaccaatttcacaacaggagtctagcttcccatcattatactcttggttctatctccggcaactcaatatcgtctttcggattgatcgcttacaagatcaatcatagcttcacttccttctgtacttcaaaaattttgacttgcataaaacaatcttccagtgatactaacgaccactgccagctcccggtgacaaagaccaacaatcatcttctcagaagagcaacgaattcttaaatcatccatgcacaacctcacaaccaagatgggacctagaacttatttgaccactgacttgaggcacctaggcaagccacgcccgctggaggctggtgagacctatgttgtccggttcaaaaactccctccgtcagtacaaagctgatgtttggattggcgtcgtgctgccggagaaattcggaccaagcagacatgtcaatcgccgccctgttggtgcccagccagttgagggtgtctggatgacacaccttaaagaccgggtttactcaatctatcttccgggacggaatatgtagtaagtttgatctcctttttaacacccaaaaagacacccaacgcggtgtgtttattgatgtatatatgtgtccgttggctttcctgcacgttttttcatctatatgtcactatttctgattgcacatatgcttgtttgtctatacagattggaagctaacatgcataaagcagatgggtcgggctgcaggatctctttgttctaaatgagaaaaccgtcaatgtcctccggcgtgcgcagagagaacaagatgctaagatctgggatgatctggtggaaatcattcgaactgagcccggactagaattctggaagaacatggctctccaggagcaaggtgctaagggcaaacgaggcaaggaactgcgtctcatcttaccgagtggccacgaaggccttgtctcctgtggagaaagcgatgaggaatctgagtccgaggaggaagataaagaggctgacgaagaggaacatgaagaggctatattagatcacgccgagcctgttactgatgttgcacccaacgcatctaatgggcaatcaaccatgagatcattttctgactcgcgtgctgcacagggcattcagttcaggcaggaattgggggttttctcagatcctacccccgctacaattgcatctgattccatcccctttgcagacagagagaactctaccttagggatgacgaagaaattccagcctttcatccctctgatacctcatcccccttcttctcgcccaacatcatcaccattcattacgccggcgaccaccatgactctgaacgtgatgcccaaggttgaaaatgatactaggtttgccaaattctaatgtccattctccacgcacattcactgaccaatatgttttaaatctacagtgatactgctagtgctgttgccgatgtggcatccgagaaacccgctccagaggtctcgatcttcgacctgaccctcaatcaggctctgaagcacgtcttcctgaaccagcatgaagccgccaagatcatcgatgttttcataggtgccgtggctcttgagagacagcccgaacagctgcagatttgcgagtacctggccaatggagaattcactcctcgcctgattacactcaagaactctggcttctcccaccccactccattcccagcctttgattccaacggcgccactatctaccgcctggttggtgaccaaatgggcattggtcagaacttcaagttgaacggtgtgggcaacagcctcgatctggaaaacgccatcatcgtccttggaagagtgtacctccaagcccgtcgttttggcctaatggatttggtttaccgaattgcattcaagctccaagtcgcctggaactgttacccggagctctaccaatgcaagcccctgcttgaggtcgcttctcttgctttcaccggtaacaccgagttcgaggagcccaattgcgattacctccagtcgtggttgattcatttcattgccgaggcctccgatttgctcacctacaatgctagcgagcagttctggtcgttgttgcgtgcccatccaaagctccaggacaaggttctccacctgcgcacgctggctcacgtcaataacccggagttgtatggaaatacccgtgcgctcctcgacagtcgtggtcttggaaacctgtgatgtgcattctgatcgagcggggataacacagtgaactgtgacccccttgtctcccaggtgcatatcaagcagattggatttctcaactctgcttgcttggttcatatttcgctttctactggtttcgaccttggatcatttgtattcttgatcattttgcttttttgcgtgctttttccttgcatttgctgattatgagctccggtcatttcgatcttacacaacagaaggagtcacatctcaatggttttatcttcttttgtttccgttgctgtgaggtggaaatagtgaggccgtgcaagcccatagttagcttttatgcttttatcagggaattattcttattcaacagatttcgtctttgatactcgcagtgatagatagataggccttcaagcgtactatgtatttcaaaggccacacgcagcttgaatctcgcaagccatagcgacaagagtagatcctagtatccgcccagcaaccttgatgtacaaaccaccttgctattgaatacctactgctgggactattttttttaaaaaaattgaattcgttatgtcaactcgtaggctaatcaatggtgagaacgatcccaaagtgcatacaaatatggcggtgcacctgtgcaaaccagccatcgctaaagggaaatcgaacctcacgcctagaggaagaaaaagaaagaacaaacaatggaaagaacaaacaatggaaagaactgaaagaaaagcagaaaatcaagattcgttaaaaaaactacccgagagaaaagaaataccagttacaacataaaaggcggaagacaagaaggaggtggtatttcttttcataattggcatgactgccaattcatccacacgaagtgggaagctcgacacgaagggaaagacacctcagtagtcatcgttagtcttctcagccttgactggcttcagaggagactcagactcaaggggcatctcaacgtcctcagccttgattggcttgaggggagactcgaggggcttctcaatggcgccctcggcgggcttctcggcgtcgatgacaataggctcatcggaaatttcgggggaagcaatcctaatctcgggagcagcctcggtcttcacgatggtgcgctcaatactgacagatgtctcaggggaggcctcggaagactcctcaacagcctggtcagcgggcttagcggcgaccttcacggcagctggcttgcgacctctcttgggcttctcggtggtttcagcaacgttgtcggtggacgcctgcttagccttgttggctgcaggcttgcggccgcgagttgccttgggcttgttctcgggggtgctgttgttgtccttggtcttgctggtggcacttcgagtgcgggacttctcggtcaactcctcggcttggctatccttggaagcatcggattcgctggtcttggcttccttggtagccttagtagccttcgagccgttggtctttgcgctaacagcctcggcacgggggacagacttcttggtcttgccgttggtagggctagtctcgttgtcggtagaggagacttctttgttgggagaaacatcgttcttgggatccttcttggcgcgagttgcacgtttcttaggctcggcggcaatggcggtctcgctgtcggcagatgagatatccttgtcgacgggggaaacatctttatcgagatctttcttggcattggaacgagtggaacgagtggtacgagtcacagtcacctccttggttggctgatcctcttcggcaggctcaacttcgtcggacttctcggtgacggtagtctcagagggagagactttcttgctacgagtcgcacgcttggtggacacctccttaggctcaatatcgggagaggcactgatcttcttgccacgagtatcatgatcatgcttcttgggttcagcgggctcggtggtgagcttagtgtcagcatcggcaccttcgtcagaaactctcttggcgggacggccacgcttcttgggctcgaccttgacatcggtctcagcaggagcaacttgctcctcggcagccttcttggcgggacgaccacgcttcttgggctccttgggctcagcctcaatgacagtggcctcagagatagcatcatcctcgtcagctttcttagcacgagtttgcttcttcttggcgggctcctcggcagcatcctcagaatcagtcaggccatgcttcttggcaggagaggactgctcatcatcgtccttgggctgttaatgaagttagtatgtcatatatcatgaggatagaacatggaattcacctcatcggccttgcccttaccagccctgacacgcatgcgagattgtccagggcggttgcattcaacatcctatgaaggattagtcagctgatctacagtctttgagcatcaagacaggtgaacttacgcccttccactcgtcgtcttcgacgtggcccacttcgatggccttgcgaatcttggcctggagttccttgctcatctcatcaaagccatcaatgcgagagaaatcaggatcctcgctgttctcagtgagcgccttcttgacgttcataatttgcttgggggtgaagcagcccctgcatggatgtcagtactcagggctatcatagaccttatgttttaacaaggctagactcaccagtggcgccaggaccagctctggaaggtcgagccgtcaacccagctgccgactcgcaattcacccttggcgatctttgtcttctccttggcacattcagagcctttgcagccagcacggccttgagcagcgacctctgatcatgaagttagctgtgatgtcttgaagtctgtcatggtgccttggatttgggagaggtaggtgtttttgccagaaatgccataggttagggcacaacatgacaatatcagttgtgaaaccaggcattttcacttgatacaacagatatacatccatcgaccatgagcacagcagtaggaagacatagagatatgagatgaagctacttaccgaaacggtagggcattttgactagtggtagtcaaaagtagggaaaaaaagatgtgtgagagaagttaacgatggttgtgaagtgaagtaggtacatatagttttctactagcaggtcgctggcgaacaagggaaagtgaacaaagaaagcgagaatcgtttgcacaataaacgcagtccgaaaacaggcaagttcgaaattgaagttattgtcagagtcaaatgaatagaatgttacacatgcatgagcgtcaattgactttgaaccgagtattgactcacgttctttcattgttctcagtcgaccgtgagtactcgtgagatatgaagtggctgggacaaagaacgtgtcatacccctttcggacagctgtgttttctggccaatcagagttcttctcggcgcataatcacattgtactttttgtcaggatttctttctgaattataattaatacattcgactagtgtgtatagatccgacctactagacctaaaaggggctggtattaagtgctggtaagaagatgaaatctattgttcaagtggtagtccaagtattgttaactccaatagatagctcaaaatagacaatagttatccgcggcaaagttggagtcatagaaatgagggtatcatagcatcttgtagcataatgaatgcaaaatttaacgatgtgacgagaagcgttcgcccacgttcagaatatgttggtgggagtcgatcgtacctgtcatgatatatttttagtcaattttgtagactttcccattctataggcatacgttgtataaacatccgtcatgggaatctgacagaacgtaatgctaagagaataagagtttcacattagcatcattgtctacaagctgtcctgaaacttccaccatgcgtccaggacatcgttgtagcccattttttccagacgctgtgcgacctggcggcgctaatcttttttagaatattcattcccataattaaaatccattcctgcggagattcggaattttgttctgacccattcgatagggacatagccagcaagctcccagtcgatgatatctagcgagcctgtcgagatatcgacaagaatgtttgtaggaccaagatcgcaatgataaaagacaagtctagagacatccatagacatctcggtacaattctttaggagctggaggggcttggaattcggaagaggcttgggtgcagctgagagagcgaaatgcccccccattgccgtcgctccagcatgcttggtcgggtggaatattgtccgggaggggggacgaataatgagtaagaagaagcgtatttgagatcagccaagaacttttgtcaacttcttgtatcgagtcattgaggtgcggctgaggcaggttaatcgctgacatgtcgattgatgttgaggttcgaataaacacaaatattgctgtagccgttttacctatggctccccgctcaccgtgtcagtgtatactacagtatctagaagatagccgattatcaacaagctaaatagcatagaagtaagtatctcgaactaacaatcgttagttaactatacaaaagaaaatcttcagaaagggtatgccgctaaccgaaggcggttagagtatgtcgacgttaaaggttcaaggttctacatcttgagcttgttactacttactactcgcctttctcgctgctttgaataaaccaaaatctacacagcacacagtggaaatctcccagaaactgaaggccaggctcttccaccaccaatttaaagccgaagacgcgaatccctctcactcgcgcaaaccccacgattccacgcggtcgcatcacctctcctcaacccaacatccacacaatgtccgagccaggcccagagtcgatccccacaagcgcggatccccgcagcaagcggccaacaaaacggcgcgccgtgacaccgcattccgaggtcgccaaccagatcgagacactcttcaaagacccgagcaaagacctgcaactaccggatgtcctgaagccgcgcaccgtcgcgtccctgtcggcgccgccagagatcgtcaccaatgtgcagggatcgtcggccggtgcgggctcgggcgaattccacgtgtacaaggccagtcggcgacgggagtatgaacgactgcggatgatgcagtccgaggtggataacgagaagaataatgagacttgggagaaagagcgggaggagaagaagcgcaaagatgacgagaagacggagaagaatcggaaaaggagggagaagaagaagaatgcgcgtgggaagaagggcggtggcgatcataaggatattgctcctgtggagagctcggctgccccgggctcgatggtcactatggaagaccaaaatgggggcgatgtggatggccaggtggcccagcaggaagttcctggtgtcattttccacgatgaggactaggggcagatttaaatgctggctgtgtacgatacgaagatacccatctggatttggtttttttttgaatctaggatattcatacagaaggaagacagccatgaggcaaatcgtgtaacattatgtacggacctcgagtccaagtatcatttttctttttcgtctatcaatcattcgtcgccgccaccaccgccgccgctgacctgctgggcggactttgcgctgcagatgtcgtcgacacggagaaggagacatgcggactagaaagagaaatatgttagtgaaatgtagtgtgtaggaaacagtaaaagcttacctcgaccgcagtcttgatgctctgaagcttgacggcttcgggctcccaaacaccgtactcccgcatatcaaccaactctccagactcgccgtttagaccccaggtgttgtggccctcgacatgcttggcacggagactggtaagcacacggatagggctagcaccagcgttctgggccaatgtccggggaatgacctccatagcgtcggcaatggccttgtatggccactgctggacaccctcaacggagcgggcaagctggctgagctttacggagacagccatctcagtagcaccacctccgggagacagacgagggtggaagataacgttgcgagcaacggacatggcatcctgcaagttgcgctcaatctcgttcagaatatccttggaggggccgcgcagcaggattgtgcaggccttcggggtcttgcacttgcgaatgaatgtgaagtactcatcgccaatcttttcaatctcgaacagtccgcacccggtaccaatatcagactcctgaatgtcatcgacgcggttgacgatggtagcaccggttgcacgggcaatacggttgttgtcggtctttcgcacacggcggagggctgtgatgttggccttcaccaggaagtgctgtgcaagatctagtaaatctcggtggttagaacatgcaatcaatcattcttaaccaggtcgcctgcttaccggaaacacccttctcggtaataacaacgtcaggcttgaaggccagaacggcctcgcacatgtgcttgacctgctcctcctcaatctggagaatacggttccagtcatcctccttggaaatctcaatgttggtttgagactcgcccttcttgtactccagggggcaatccaggagaagaatacgggggttctcgattctgcgacgcatcttgggatgcgtgatatctttgttgaccatcacaccatcaatcacctcagagtcctcaatttgaccaccggggaccttctcaatacgggcatagcgtttgatgtcgacttcctgctttccactaccgacatcgaaggaaacggttcgcacagccttcaatgcaagaccgcacatgagctctgaccaacgggacacgaacttggttccgatggaggactggataagactgtacatggccttatcatcatgaatgtcgacgggtgtcgagacatcctccacgatctgaagggcatcggcgagggcgcgcttgaaagcctggataatgacgacggggtggatgttgcgttcgagctgggggacggcctgggcgagcatttcaccggctacagaatatcagcattgactatcgagtcctccgaaatcaatattgccatacctaggatgatgactgtcgtggtaccatctccgacctcctcgtcctgggtacggctgagctcgatcatgctcttggccgcggggtgcgacacttcgatctctcgcagaatagcgtggccatcgttggtcaacacaataccacccatagggtccagcagcatcttcaacatcgccttgggtccgagacatgaccgaatgatatccgcaacactggtgtttattgaattagcatcgagcgggggagaaaagcggaggattgagggatagcgtacgtcttggccgcggtaatgttagacatctgtgctctccgaccaacctggcgctcgccagaattggtgtctggatgatttgttagcacttaaaaggggagcaacttgatgggggggtaacctactcatcaccaccaccggagcctgcatattggcggtgatttattgtagttgagtgggaaatggatacaaaagggtcttgatcacttgtgaatatcaaaaaaaatattgcacgaagatgatgatccaagagttcggacgtcaacgctgttcgcccgcgttctattaaatttccaggcgaagtgggagctccctcgggctagtccatatacggctagcgtggggccctgacaaactaggcaaacatctccaacttcgttatctagaagtctataaagctgtagttcaatatatagtctcactacttttctcattgggtatttctataaatgttcaaatagcactgcaaaaataaaagtagtctaggaaaaccgccatatccgacctcagcatgccaagcgactaccataccaatatgtgtcttcacttggatcacccaacttgaaggacatgacgaacaccctgggcaaaattgttagcttattatctacggcaccaatgataatagaaattccaatcagccaaaccaatatgaaggataactccgctgtttcgtaaagggaatatctggatgcaaaatcacacaaaacgagcaaggataagtacgggctaacgcaagctatgaaagtagtgtacaagaggtggagttttgttcaaaattcccggctctcgccaatatcacacacatcgaaaacaccagtttcagcaagatcatgttttttcaacgcctccttgagcttcttgggaggctcaagcacatcctcctcagtaagcacccaagtgccccagtgcatgcccaatgcatttttgcacttggtatctttgaaaatgtgaacagcatcatgagggtcagaatgtgcggcactgaaaatatgacgaggtgcgtaggccccaatggggatcaagccgagatcaaatggtccccggaactcacctatctgcttgaaggcagggcaaatagggaaattgtatttggggtcccaatcatcctccccttccggtagctcgtccactgccctgtagccggaatcactagattgaggtcagcaaagcaacattctgatagcgtagatggtttgggaaagatcatacccagcaaaatacaccttgctaccgccagattcaatggcccaggaagcccatagtgtcttgtacttatcgaaaggactgcgggcagtgatatgctgacaaggcagacaactgatgcgtgccttgatatctgctgtggcagaagcttcgcctacttgttcaacctggggattctttctctcctcgggtgacattgcaatatcacgctcatcccaccaatccaactcggttacattttggatgcccgagctgtggaaccaagacttgttgccaagtggtgcaaagaagtggcaattggggtgccttttcgcgatttccgagatagttgggtatgacagatggtcgtagtggttgtgggagatgaccacagcatcgatgacagggatatccttgatctggcatggaggctcagtgtagcgcttcggacctaggtgatatggtccgcagcatggcccacatcgcgcttcgaatactgggtcaaacagtactcggaaaccgctcgggaactccacataatagcatgcatggccaagccacgttgaacgcagcttgggggtatctcggctggggagaaattcgggcttgcgaacggtgacagttggaggggtggtatcgggattatttcctttgccgttgaatcgacgagtactatagttccatgtgttagagactggcttcctgcgataatcgatcggtatacctacatcatcatttgcatgatatctcttgaagtcagatcgcgaaaagatctgtcatacggagttgctggttagtctatacgaatgattgcagtcacggagcgtcacttactcccacgggttcctgaatccattctgtgcatggtgacttttcttcaaaacatcttccgggctaggtctggccggggagttcgccacagtcagcgcatatagcactgcagtagtgggtgttgtgctcatgttgcggattgccggttgaacagttcgtcgataccaagcccgccaaaggagcggataacggagaagaggtcgcatcgaaggccaaggcgttagaaaataacgccacacagaatacgctggcgccttaaggacaggaatgcgagaagcaggaagttactttaataccgataactccgacatggggccttcgcgcgttgggaacgccgataccaccggagttccagcacatccgtccccatcttgattgcttgtagaccactcaaggtacattcaaacctaggaaggttgtagttcactttctcatcgtcggtctcccatggattgccctgtgaaacgcccgtgggtacctcaaatgctcggcccgttgtaactccgatatctgtgcttatcgatcttctcaacattcgcgatcttcacgacactgttgatttggtatggagccaaatgcggtccctagcgctgcgccgtctgcgggcgatctgattctgcagcagaaaacacaggcgctacagtcggcccaaaacggcgacggaagtctcctctcgcagctaacgagcaatcccttgtttaccgcggtatgagccgtgccagtgtttcgatcccagatgatgtgctaatatggttctctgctagggatttggccttgcaggtctcggagcaggattgacactagcacagaaaggtgttcgacatggcgccgctcttctccgccggcggatgctggtggacgtcgagatcagcatcaaagatgactcgtatccgtggttcctacactggatgactctgtaccaacaatcacaactcaatgcaagcaaagccgctgcgaatacctctacctacatggaccgattcctccaaaaactcacgcccggcatgcgccatctctccatccaaacgcagaaagtcgaacattcgaacggagcaattgatacacgcttttcgctgattccgggtcctggaaaacacgttttacggtacaagaatgcgtttgtctttgttaatcgtatgcgcgagtcgaaatcccgcgacattcagaccggaaagccatgggagacaatcaccctcaccactctctattctcaacgtcacatattcgaggacctcttcaccgaagctcatgcatacgccgcgaggggccacgaaggcaagacgacaatatataacagttggggtaccgagtggaaaccatttggaaatccgcgccggaagcgtccactggagtcggttgttctccacgagggagtcaaggaacggattgtggcagatgtggaagacttcatttcaagttcatcatggtacaacgaccgtggtattccataccgacgaggatatctcttatacggacctccgggcaccggcaagagctcttttatccaggcgctagcgggcgagttggattacgacattgccattctgaacctgagcgagcgcggcttgaccgatgatcggttaaaccacctgctcacaattgttcccaatcgaacgctggttctgttggaagatgtggatgcggcgttctcgaaccgacgcgagcaaagcgacgcagatggttaccgcggggccaatgtgactttctcgggactgctcaatgcacttgatggagtcgctagtgccgaggagcgcatcatcttccttactaccaaccacgtcgaacgactcgatgaggcgttggtccgtcctgggcgtgtggatatgactgtccgtttgggcgaagtgactcgttaccaggtcggctccctgtgggatcgattctatgaagacatcgataccgacggggtttatcggaaacttttcttggatcggctccaggagcttggcttgattgaagatgaatcaggcaacaaggctgatcggtctattaacaccagcgcggctgctctccagggcttattcttatataacaagggtaacatggaaggtgcgattgccatggcggagggtctgacccataatgtgcacgctgagacattaggtcaagactaagggaagaacgaataattgtacactatcatgtaaataaatcatcaaaatatagacatccttgtgggctgcgtcctttagctcatgccccattctcggcgtttccttctatatgtctacactgtcaggctgatggcagtgcatctgcgcggttctccgtccactcgttcttaacagggaataaataaccaacaaggatgagatgcggtgccactgatacgatcgacccttagaacaagccaagctttatgacctgaagattatcactatcagcacatgtgaagtattcctgcaccatagaaaatacttctcaaatccagggcgagcaattcccatttaatcgcgcaatttcatctatcagtattataattcggcctttcagataccggtcgccatgaaatagttgttctttctctcgccgatgactgaactgactgtcttagccatcaccctcattacccctctacaattcacatccgttcctcaccgccccccgctctccgtttttcgtccgtatgtgatagcaagatcagttaggcgcttttgaagagtttaatatatggtgtgacccgtgtgttgatgtcaatcctgtttcttgaaattatccatttaacaatatccggagccgataagatgcagatactagggtcaacagggtcaacagggtcagcagggtcaaactccccgacttcttcaacgcaaaaataaccagccaatataatctccggattctgataaatatagattcctcatgagccaagcaccaatcaccacgctgtatcgaagcgccgctactgcagctgagatgtgcccatcccaggatggaggccaatcacatccctaaacggttaagcgcccactcgtataggcagggttgtcacacatctcgacaaaccatatactctgcttggtctgtcgggctgatgcgcacattcggtgagaatgggttatatctcacccgagaccccctgctttcgcgttctgtctttgtttatagcattcattcgcgaagatgggtgacaagatgaatcaatttcaattatttcctgctccatcacccgaggtcaataggtccaacaacccatttcgcaaagtcgggagaaagccagtagccacatctgagccggcttcttcgatccctcttcaggaaatcaaggaccctggtaagactgaatccttgctgcttcagattatcgaagacacccagggtattccacctccgccaaaggagaatggttcgaaatctaagtccccaccttctatggtgggagcatctgattcaaaatctcctcagtccatgcacagtcagaatcgtgaagccaagagagtgaaccatcaggccttgccttcacagggcagtcaaagcagcagcagtagcagccaccacactacgccgtcaactgtctctccgcagtcatcacaatcgtctgcttcctcagttccgatgaaatcaatgttcccgcagttcaatccaaaactgcctctcaaccagcaggtatatcacccacggcttccaaatgtgccaagtccagccaagtcttctcgaaagcctcctaagcttacgctttcgacaaatactgagattgaccatgttctcgggccaaagactgtgcctgcaagtgtgctcaacttcccaactggtgcattggagtccgaggaggttacatactcctctgtggaggaactgaagatgttatgggaaacggccaatggccagagaacacgagatcttgttgggtcattgaacctgcgcatgacaaagtaagacttcttgccttatagatgtataatactaacatctcacagaacgggaccagctacatttacgctcggaaactcccagaacccgttttacacactacaaacatattcaaccaatgaactcgctctaagcaggtgcgacccttccagaccaaaccacgatgtaccaatcatgatgatgagcctcgaagaccgcatacgtcgcgagcatcccaacgacggactcgtgaccctactcttcccccgactagcagccatgttagctatagaccaggccgacgagatcagcaagcaacaccacctcacgcccgccgagacagcggaagtagaaaccgacgcactcaaacgggcagcagcacaagagtcctgccggctctcctggaaccgccatcaacgactatacgagctacggcacccatatttctcaagaaataacccgcctgctcttgtcggcgccgccggaaccccactctcacccgtgcgatcccagtcgtcaggaatggtgcacatcacagtcgatgcctctcctcgccagccgccaacaatcatcgtaactggcccggtctctccaacggcactggaagccggtctgcaagctgctaatgcacgcacatccgtgcttcccgtcacggacctcgacgagccgctcgcgtccttggacttcgctacgaagacattttcgatttcgccggctgctgtggtcgctactattccctccctgtatgccattgattctctcattgctgcaatgctagcagtcgccgtctcagatgaagccacgaaccccatccttgcagacatgcttctcggatcgccgaagtcgtctagacctccgacctcccacaatcccgggccttaccctatgcctgtgttccagggtaaactagttacgactgttgctgagcgccaagatacagcagagagcatggacttggcatcgcagattaaatctgcgcagaaaaagtccaaagagtcggggaagaaaagtaatctcaaattttggagtagattctcttccaagacgaaggaaaattcgaagaagagcaaatctcagcaggttgtggttgaggagtttgacctggagaagtatggtcgatatggcaatagttcgtcgcgagaggggaagaagttgcctggaattactcgcaccatcttgcgtatacttttctttggcttggatatagttgtgaagggattgacgctcattgtgaagatcttggcttggttattggtcaattcgacgcggtgtgtgactagtgagaagttctgagctgggcttgaatcttcttattctcgatgttggttactattgggttttcctttatatggaactgttcggaagcaatagggtgagttgttggaccatgtcttagttatactgttatacccaatttgatagttcttcgcgttatctttagactctaagaattgcccattatgttattcccacacagtactcaatgtccatatatatacacgggaaaattacatttggtatcgccaactgattgattgatagcatcttaagctatagcctatacctatcgccggcagatccatacttcgaggtgacatatttcgactccttggatattacatctaagcactacatatcatagcaccaaggtggtatcgacttcgatcacaagtagagaatttggattcctttgaattgaacggttaccagccatcttgaataagatccatgaaacagaaaaatgagactgtcccttgatcctttaatccaacattcttcggagtataggacctagggataagccaggaacgtcacagggagatgacaactggtagattcttccatcagtccagtacatacaaacgataaacaggagaccaagcgtacgtggggctggaaaatgccacctgaagcttcactcttaggataagcaccgtcccggaattcctagacgtcataaacgccataacaccgcgattaagggatgaagggatatggatgtgatgtcaaagcatttatttcctcgggaaataattgataggggaatccaattgtaaataaagcaccgagtattccacgaaccagccgttccctccatagcttcgttccgttatatgctagactccccatcctagtacaactacctccaagctcgcaaaccacttctccaaaaaccacacaatatccaaaatgcgttccttcatcactgcctcagtcctcatcgccggcgccctagcccaatcaaccgaagactacctcaagtgcgccgtaagaactccaacccaataaaccaagtacctaaacaaacctaacaacccacccagagcgccgccttcagcaacatcaacacctcaaacttcacctcctgcagcaccaaaacctcccaagaatgcttctgcgccaacaaatccctaatcaaagccctaaccacatccacggccccagcctgcgccggcctcgacctaacatccctcacaacctccctctgcagcaacacaacagatgccgcaaccgcacgacacgcaagcagacccatgcagctcgccgacaagaagcgggcctttgcacctgcgcccgcacctgagcgcgaagccgaagctgctgttccgcacgtcgtctacgtgactgagacacgcactgattgcagctgcaagagcactccggttgccgaaagaccgatgcatgtctcgcagattccggttgatgttcccgctagcagtgccgcttctatggcggtggaggcatcttcgacgccggctagtcggctgcatggcttgatgggtggtgcggcttcgtcgtctgtgatctttggtccgcaagctacgtcttcggctgtgccttctggtgttgatccgactcgcttctcgcctttcaagggggcggctgcggcgggcgcttccgtgcatggtggtgttgcggtgcttggggttgcggctgctatggctgttgttgttgcattgtaggttgtttgaaagggtgcttctcgtttatttttgacttggttagcagttagtttatatttggggttttgagattgatgttcagatgggttcggacttggtaatgatgcatgaaatgtgttttggcagtgttattagtcgtatattatcttcaattagattaacgttcaccgatttttgctgataattcatacatggcgaaaaagcggatagacattccacctatagacgtaagagtaaaactccaagacccctgctgcaactttgtctggagagctcaagcgtggactgcctgctggactctagggtaaatctccaccagcttgtaataaatatccgggtggtcattaatcatgacctgaggatcccaagccatcgccacgaagatggtctcaacgccactaccaatgggagtcatgaagacctggcagacctgaagaccaatcaagaaagcgaaagccatgatgaccgcggtgaagttaccatccctgttgtacgcggggttggtgaactgcagatagagataggacaacagcgcacagacataggcgacgaaagtcgaacccatagtcaacaccggacccatcaggcagtcttgcacgagagcatcaattcctcgatcgcgcatcatagaccaagtatccttggctgcggggatatatgcctttccgtacaatgcgatgtgacagaacgcgtagcgattgaaaagcgtaacgagccagtccaacagcgagatgatagatcccaaaatccaaacgaaaatactgccgaccaagttaccctgtccagcctcttgtcgctgcgcgaccgagcacgcctgccgcaacatgttgatgaacgcgatgatcagactgccgaaactgatactgccaaaggagtacgtagtcgcgcgacggaaggcgccccgggtggagcccttgggcatgccgccggcggacttgctgaagaaataccacgaaccgtagacaccggcgacggtggtgtgcaccgtgttcttgatccactcactgacccagtacatggcgaaggtcacgtagacgacgaggccgatgacctttgctctgctgcagccgccgttcgtgcaggatgggttgttgccagtggaatcgggctcgtaggcgacgtagatcgagaccatcgtgacggagaaccaggcggcgaaagcgaccgttacgattccgcccagcgcgctaactacgaagatgtgcccgtaccctcgggccacgtccatggcggtctgcagcataaaggcagtgaatgggattcgcgggatccagctaatgaaacagacgattgcgaagacgccgaagatgaggaacacgataccacctccatattgcttgcgcgcgatgtaatagattcctgttgccaaggcgaagacaatgttgagaatgccggtcgcccagatgaaggtcttggtgaagtatcttgcgcccatgaaatagagccaagagaagactagggcgacgacaaggacgaagataaacaagacgagggtgttggtgtccagcgagaaatcattgctcgagtcgtaaatgccacctccgttgaagcctttgttggtggcatacttgtggatggtaagtccggacacggcggcatacccgaggaagactgcgatcaactgtgtaataggttagctaaaggaggttatcaactcgacacggccacactcaccaaaagacctgcccacaggtcgttccactttggcttctcgatcttgaacgcctggtcaaaagtgtatccagactctgggacattttggtggtactgcggtggtttgggctcagatggaggttgctgataggctggttgctggtatggcgcattatttggcggttgatagttcccatgttgctgttcataaccagagttgggcggatactgaggttggccctgagggaagccctcgttattgtaatagctagcagcctgtccactcatatctgcgacactgggagaagggggaaaacaaacgaaagaaggaaaaagaaacaaaaggggcagcaagggttttttaggtttggctggatttgactggtgacgacatgaaaagaatcgcaaacctcgattggcaacgaactcagccctagcgatcgccgatctgcgctaaatcgacccgtggacccttttcttagatcgttgaagatttccgatcgcctcgtcatagtttgatttgacggagctttgatttcatctgaagagtttccatggctcgtgagaaatccacaatgtaatttggacatccggaaattggagagcaggacctacaacagaggtacaacgagaattatagtttgcccagctttgtttctgtcatgtcctgttattacagccctataaggagtagtggttaattaactaaggacatctaccaattggtaactggattgcctaaaacttgagaaatgccaagtcggttgcctgcttggcataggacttcgttacgccagcaggaatttgaagcgacttgatattgccccttaacatatgctcgcgttaaccttggaaaacaaggtggattgggtaatcacctttgatgcagccctggcaacattggcagtgtgaacaattcaacgagtatatttgacatcaacaaaacgcggactggctgtcattttcttgatcacaagattcattcattgctactctcgagctctctagtagggcacctccatagaccaacttttccacaatgcctcactggtcatgcgaatgggaaagttgtaagaaaccagctgcgcagagagcaggagattgcttgctatgcgataggcacttctgtcgcacgcaccgccgagagccgtggcacaaatgcccaaagccagaggtttgtggtatagccataatacaaatgctcatgctcatctaataggaaaactgggaatcatactctgctcaatatacagctacagaggctcgtcacatagacgagctatgccttcgaatagactgatattgttggcactctctttgacgtcccactaggcgaccaattctttcttaagcacccggatgataagggcgaccatattctagttaaggaatgttacaatattgtgggtatcatcgactaggaatggacgcaaactgtctccaaggcggaggcattctgttcccgtctatgatgtggctggcagctaagttctacaccggctctcatgagctacccgcggacgaattgcagctagctgctatctttcgcgaaaagggccgcgaggatcttgccgtctgtgtcgtcgagggcaggaaggctcaaagacttttcttcgctcttggtcctgagagctcttttctagatagacactttcacatattttcgcaggactccagcgggccttcaaatttaaagatgaggagtgggaagcatggaagagcaaggcttcaaagaaatagaaagatgatgacctacttcttggcttgttagaagaagaaaaaaaggaggaaggggcggggcgaggtgagagctttgaaacagaatagattttgcaaatccatttgtccaacagcaaaagaattactgtgtgaaggttggtttcaataaacaactaaacagccttagcagctagggaaatgaatctatagcatgctctcgaatgtttacttggatatcattcatacgaaagcttcaattctatggctagcttgctgtcatcatattctgaagctctaccatcacgaatttggcagatttccagttgtccttgagagaatccagggatcaaacctcacacgaacctagtagtagtattcttccctaatgtgtggcacataattgtctagagtcgcttgacataaatcgtatgtaaaatcgggcaccgacttcatgagttcggcatcaatcacaggagtgcgccctgttcgaagacgcggtaggttggcaactatcatttgaatcgccaattgcctcagcttctggtagttggcttgtgtcgaataaagttcttggatcatttctgcaaaggaatctctttcgagacaatccatgaatgatgcacgaaagtgtccctccgctttgcttttcagatcgccgatcatgaagtaatccgccacgccatacatgcgcacatggaagtaacatggatgacactcagccaatgtatcggccacaagctctacggtgtcccgttgctcggataggatttcgtcatttggagctgattcattcatggccagttccgttggcaggggagactctatcgttggctcgtctgcgtgagcttcaccgtcaacagtctctggggatttaggcgtgcgggatcggaaggtgtagtttcccgtgtagaggaattccagcatcttctcgattaggatcggatcttgttcgtccagatgaatcgggttgtaggtttcctaaaagtcatcaccgcttgtcagttgtggtacgaagaatcgtccacaggattaacttttactaccttgaacccgctagaacaagcccgacgaaaatactctgatctagagcagacgaggagcttatgagccgagaagaccgcatccttgcaaatgatagtcaaatcgctatagtccgagttgaggtggaggctactttagcgttagttcatcgaaccgaatgtcatcctgaattggtgatttctcacctagcaataaggccaagaataatctcctggtctctatataccgaagggtctagatcactcattgtggatgatggaggtctcttgaatgacggtgaagccttatatttcttctttttcatagccatacggaaaatgaaggtatggatatcttggtgggtttggcagattgtaaagttggatgaccaagatattattctagcgactgatattgtttgctacaagcgcaaatactgatgcaccgctgcctaaccccgcttcctttcattgaaatgctatgttggtttgggcggcaactatccctgccacagttgtaccctaggcggcgaagcctgcgactcctgctgaggtgcatgactctaggatccgctggttttaacttggtgaaggacatataaaacaacggtcacagcaatctctcacctcgataaccaacagctctcgtttccttttcaacctgacaacacaatcatcacaatggcaaccaaaaatctccagtccagtgaccatcgcgacctacttgatattatcgacaaactcagattgcaagggattacccgttgggtcgaccttccagagatcatcgtttgcggcgatcagtcttccgggaagagctcagtactcgaggccatctcaggcatgtcctttccgacgaaggacaatctatgtacccggtttgctaccgagctggtccttcgacggggagaccggacaagcatcgacgtctctctcattccggacccgactcgccctgaagcggaacaggtgcgactccgctcccaaaaattccacctcgaaaagcctctcaatcttggaatggtggtgaatactgccgaaagtgtgatggggctggatggcgcgaacaagggcttcagcaccgacatccttcgcatcgagctgtgcggcccgacccaaccacatctgacgttggtggacctgccgggtctgttccgggctgggaacaaagaacagtctgaccaagacgcggaattggtggaagagctggtgatgggctatatgaagcgcccaagaagcatcattatggctgtggtctccgctaagagcgacttcgctttacagtcggtcaccaagcttgctcgacaactggatacccatggcgaccgcaccttgggcctgataaccaagccggacacactggatgttgggtcagacagcgagcgcgcctatgtggaactagccaagaacaatgacgtgagattcggacttgggtggcatgttctgaagaatcgggattatgccatgcgcgatgcaagctctgctgagagagataaagccgaggaagaattcctgtccagtggtgtctggacagaactggagtcaaatcagcttggtgcgaaaactttgggaccacgactaagtaacgtcctcattgaccatatcattctctatctttctgctatccagtgcgacgttgaatcaggcatacttggctgcaataccatccttgacaagcttggggcctcgcgggccaccttgtctgatcagagaagataccttggcaaggttggacaagacttttcgatgctcatgcaagctgccgtcaacggcgaatattcgtattattcgttcttcggagacagccgctctgatgagagttaccacaggcgtcttcgtgccgttgtccagactactttgacctccttcgaggggcagatgcgcaaagaaggcaaggcgcgagtcattttcgatgaagaatcagatgataatgagtcggacgagccagaaagacaagagaatttgtgtatgatctcacgatctgactacgtggaagaagtcaagagtctgatgagacgcaaccgcggtcgtgaactgcctggcacctggaaccccatgattattgcggagttgttcagagatcaatgtcagccatggaagaatatagtcggtggatgcatcgctgagatcattcgagctgttcatcaagttatcaacgacatcctcgagcaggtttctgtcggcaagaccacggaacgcatacgtcgagatatcatcaacccgaagatggaaatgctggtgcagaatctccaagagaaggttaccgagatcctcaatccgcattactcagggcaccctatcacctacaatcattacttgacgactactgtccaggaagtgcaaaagcagcgatatctcaaatcagtcgaggcagctttaaggacctccgatgctattcgaaaggagaaccgtcatatcagcaagattaattatagttctctggctaggtccgtggctcaatacaccgagcaagatatggagcgagttgccagcttgcaagccgtcgactacatggaggcatattacaaggtgactttatttttcttttcctctctgactataatatatccgtctcgctcctttcgtgattttagtatatgcctacgcatactctcaaaccgccaaggactgttgttaataattcttggatacctaggttgccctgaagaacgtgatcgacaacgttggagctctggtcgtggaagcatgcctgatccagaaattaccgactcttttcatggcggacacggtctacgacatgcaagacaccgacgttcaaggcctcgccagcgagggtaaggaagtagtcgaggagaggacaagagcgatgcagaagcttgaaagacttcaaacctgcctccgggacctgaaacggttcgataagcacggctctgctcattcacggtaggccagcagctttccagactgtctctacggtcagaaggaaagtgaaatgaagcgttaaaatgctaagtcagcaacaatagtttgagaagggtgctgtaaagaagacctcgaacgactcttctgctgaatgtattgagagtgatcgggttctttttttcttttctttttgaacttcaaggtacctttttggtcttcggacaattgatgagttaagccaatggcgagaccactgctcttcttattttcagtcatggcggacacagcaatgcgatgtaattgtataccaaaacagctaatgccctttttgcttgtggaacataggaagtcgaagaccgatcacgtcaggggggaattatgagtaagcggatggattctcccatcgggttgaccctttagtttatttttttcaagaatacaaacacgcacttgcggatttttcctttctatcagaagcaagtagatcagcatcttcagacctagtagccgaggagatgggaattagtctgcgtcttcaagtccttgtagtcccctacacatttccgatataattcatgcatctgaatgaaaattacacttcataaaaagtgctaccagccccaaggtacatatattagaaagaattgatattagacaagcagaccgggaccagaccgactcaagtcatttcaatggatgatagtatagataccaggcaataaatccaggcatacgaccttgagcgctatacagcgtcgtactgagaagtgtttgaaattttgtacatatgcaagaaaatgaatgccgtaaatgctcgattcccccatttcgcctttcgaaaccaagacgcctataatgcaggcaaataactgccctcgctaaacctcgtcaacttcgcaattatgaatacaggccattgtctaagaaagacacccaacagacatggacgccgagatggccattcgcttatcgaaatgcatgttgtttcaagtgacgccaggaaccgacaacccggtgctcgatgcctggggttggtgtgttgcttcggccggcgaaatcatccgtcccagaatgaagctgacctttgctaaaagctactgatcgtcgtaacttctcttggcggacagccgtacggcgttgagctcggagttcttcgatacgaccttgtccgacgcggtgcttacgtacgaaacattcatccatcaacgtgttggcatccaacagttttttggggatggtttggacgatctggaatgcctccatggggtctgtgacggcgagtatgtccttttcgcatgctttaaagattgccaaagacacacggaagaaggtcttggagccctcatagaagaagacatcccaaactcggagagtagtttcaagaggtaaacttccgatgaaaaccgacataagccagttggtcagtcccagggttatgtccggcagccgagaattcactgtcaatggaggcattttgccccgtccggacggggttccacccatggaagcgatcttggaatagatgcccggcatggtgtccctgagcaggaccatgagaatccagaggtcaatgttcgcaccttccagactaatttcatgggttccaggcaagtagtctgcggcgataatatgcaacatccagaatgctttttcctcagggaggaagagaaggagcattccggtgatgaaattcagagattgagtatatccgattttcgggttgtgcagcgcataagcatacagaacccgacgtagagactgaatcatctgcgtttctgtagtgacattagaataactcggattgctgctcccggactgttctgcttcctgagtcacctccggtttgaaatggaggttgtcggggaatgtgcggtggagatcacgctcgatgtgctccttgtcgtcgttactcggtgaggtcatggccttcgcaacgagttcatcatactggccaaagttccggttcaaatgctcgtacccgccggcgtaatagaaccaagccgcacctcggaactctggaggaattcctttgcgaacaaatcgcttgactttcgaagactgcggcggaaatattgtgggctctgatatgggaagcccatgttccttgagcaattcacaccatttggctctccgttgcgtcacatggctggagtaggatcctttccaggtctcgtattcatccagggtcacatattgggtagctttgcgaaatccgtaaccgtctcgagggccatctccagagcaaagttgcggcggcactaatcccggaataaaaacttttgtcgagggctgtcgttggtgtgtatgatgcacatcagctgccggcgatgttgggggggtgctatcggagggagcgatatcggagggggtgagatcgcgcggagagtctggcggaacagggtccgacgggtcgggttcaggtggatgttctgggagtgcaggttctaatggtgtgaactctggaggcgattctggaagtatgggcggtatggggttgggttcggaataagccatgtttggcaaaaacaatgagtctggccttgcatcttgagaactgggaaaatgtggcatcgaggatgccggaggaacgtcgctcagcgacggatattctagcggttgtaattcatgtaggttcgaatcgcgtgacggcgggggcgttgctgatggcgctttactccccgcgtgggatttcggcgagccaggctcttcggtcacgtcgctgaagccatcaagatacatggaaatcgcgtcttcgacactcatcccattgtcgtctccataaggcgtatcaggggtatccggtgaaagatcggtgatcgagctgctcttggttaggacactgctgcgctctgttccgcttgcttgttcggcgctcgagcgccaggtttccgaattgacacttggtcgggactgattctcttcggtaggcccgtttgttgggaagcctgtcatggaaatttcctgggggctcatgtcctgaaagcggcgctccatagattcctgcgtccttgggcgcctattattcaacctagaagttgacatggatatacggagaccccctcggcctggcatagctttccgatgcactgcccgttcgaggtcatctcgctcgggccagttcggggaataggtttcaggtggtgtggcgtaagctcgagtgcgaccggcagttctaggggttttccattcgcccctcgtcccgtgagaggggccatagtgaggcggagtgagtggccacgggttgtcatgataattgtgaggccgccgctgaggcgaacgcgatctatggcgaattgcagagcggggggagtgaggtgaggatctcggagcgggatttgcggttcgcgggcgtgggtcgactaaagactccaattgaagagggtgaggaactctgcgccggccgggaaggtcgaaatcagccgagggaggcggatagcgagggtttacgtttcctgtgaccatggccacgatgtcgcacccagttcccgctggacatttgttatcgctgaaggagagctatcgatcgataaccagaaagcattcggaccggaaaaagggagattctcaacaaaagggagtgcgaaagcgctagagaatgaatgaggaatttggagaaacgaaagacacgaagtgagaggccaaattcgggagacacagcctgccagaggactgtggataaaagaagagagaaaaggcgcagttgaaacaaaatcaacaaagccttgatcaggtttagggtcaggtgacgtaatatggacaaaggggcatattgactacaaagcacaaagtatggaggatatagagtggattgaccgttagatatgtactctagaatggtatttgattattctacaacattcgcattgttggaatctttgtataaaactcgataggtcagaaatccatgtgtcgatcaggaactctgggctttaatagtcgcatgttgtatattttatacagcacttgacgccttacgccagctatatgcttcttatttcttagctcaaacaccattaaggggggaagatccgagaaggtatctaaatagacctaagaactaccaaaaaagacacaaaactgcatacggagtcagctgaactcttgttctattttcctacggagtacttagcccctgaattccagaccaatcaaatatcgcaaattaatatttcgactcctcttttgacaactcctaattcatctgcgtatggccgtggaatgttaggccgctcgaacccttccgtcttcggatagcggatgtcaactgtcaactatttcaaattgagctcacattgacgtttccgtattaatttcaagagtctatttctcgcaatgtctccccggaagaaggcatgatttgcgaaccgcacttatgtatatgtgccaggggagctgcagctgcattatactattgaccagtaccagcaatgaacccgtttgcccaatatggctattgtcgacaagcaatcagcgtcttacatccgtccgagtagctgggcagatgtaagtattattaaaatccccactgtggaactgtcattgactaacatgcttttatagggtctgcgaggaattgccgcagtttttgtggtcgcgagccatacctgtctatcctttgcgacatatctgatcccgccatctttcgcggaaacaggaaagtctattttgtttcagcggccgttctttagactggtcatacagggccaggcttgggtagctatcttcatggtgctactcgggttcgtgaatgccttaaaaccgctccagctagctcgacggggagctacaagcgatgctcttgctacactctcgacaggcgccttccggcgcaagtggagactggtcttccccgctgctctgatgacaattctagcttggctgttgtgtcagtttggtgtctaccaattgggtagaagggtagatgcatactggctcagagcgacaagcccccaacaaagtccatctttgaaaactgccgtcatggatctgatgcgagagatagtggggacttggatgtacggagaaaatgcctacgaccaaccccaatgggcactactaccccttttccgtggctccctatatgtattcatgaccctgttggctctggtaaacactacaccactcttccgcctctgtgcgcaaatggtcctatacacctatagttgggcaactctggatggtatgtttgggaataatatcgcggtactgaataccccgctaatcatttcttacaggtactgttggtacaaatattttcgctggcatgatactagcggaactatcattatacaacctgatggccctccggccacgtctgctcttcaaattactaccctacgggctagtcaccctaggcctgtacatctgctcgtacccagatcaatacgccgatcaaaccagatggtcttctcagcttgcatcgcttgccgaaatcatcttcccacaagatgccaacgtcagccgctactacgccagccttggggcgcagatgatatgtcttggcgtgatgctttcttcctccatgcgccggatgctctcccatcccgtgctgatgtggcttgggtcgatcagcttcccgctatatcttatccacggaccgttaatgcgatctgttctggtttacctgctgtatcttcccatggcaattggctttgagccggctttaagggcagatggaacaccagatccggagtcttatattccaacgccgagcccattccgacttgggtttattctggttatattttttatgttcttactctatgttgttcagcagtggtcgaagcatatagagccgaagatgggtgcacttacagctgcgcttgagagattctcccgttcatggggtaagagtgcggcgtggacttcgaaagagaagggagagaccttgcctattgcgtctgtacgggagttaaatgtatagaatttttattgggataattattgtgccttggcgtttggggtcgctgacatttggacttactaaagcaatatatgaattgaacctttctaaacgagacgttcgagatttacaacgtttgcaaagtggttagcagctatataataaggctgcttcccactcttgaacttgcattctcgcaaatattttatcactggcgcagtttataacgacagtaaagagtaagaatttctggacaatcgttaagcagaccaaacccagagcaaatttcggcaaagggccgagaatacccgacggtctaaacctgcgcgttctgttctgcggcgcggatatcggaatccttcccccggtgctcgtcatttcttatgacaatctggggagaccttatcgattcagggagtaaaaatccccctttaacaattgcttattgagatatatcggatttgggatcgacgagcttggtacagatcacttggaaattctggaatacaaccgcccagctcgactcatctgtcggccgtccaagacagaggacagatcctgacaacccatctgcaggactgaacagttccttcgttttccataaaagtgacgtactctgtgaatacgtagtgcggtcacataggtactgggtacctataaccgttgcgtttctaatcacattagggtcaacgggttcttcaagaagaagctacctctcagcgactgtattcattcgaattaggtagacatcagacccagcgagagcagcggagtataacgcctattccgacacagcgggatagccaggcgggctgataagttgaggtgaatcatcgtccataatgaggctaaggtcatgccgatagccagcgggaatggtttggatcgtcatatgtataggacaaagtaccaatatatatgaataagtcggagcccttagcagtaagcacgggaaaaaggaagccacttactctcttcttctccgttgcaagccaaacctctttcccgtacttgtgaatccgttcctgttgtgcgttagcaactcaggtctaaaatcagcctcaggtctaaaatcagcatgatagaaaagtgaaattcatctcacttggtagaagcctgggagataatgtctgagaatggggggaggaggtatcgaggtcggtttctgggatagggcaggcgattgtaccgtctggggcgtttcgctgacgacggggtactatgacccacaattgcctagaccccaccgtcgtcttgacccgattcggcagtccaggacctgtacagtattctagcaattgcggagcgaagcaaagcaaagcaattaaatcagaagcctcgagtatgtatcacgtgaggggtcttttcgcatggacaaaatcgtaacaaggtgatcggtgagatttggcagagaatgaatacgaactaggcctaatctagttaactatagggagacccctccgcctgattctgcttgattccgccttacacagaaggcatcaattatttctgccagacttaatagagcagttcttgaattagttgctcaaggatggtctatatgataaaagtgactaaattttgttaacggtctctatacaaattgtaggtatctaccgtcttgctgagttcaacaccaaggcggtgtggagggcggtaatctgaatcccgaaaaatcagacggtgggttgggggtcgcattagccaaagggggtccactaactatactccgtaacccttcgcgtactagttacttaccttaggcactttgaatatgtctagaaaaggacgcggtctacaagctaggtctattgttctcagtaaaaaacccgagcttgccgtatttatttcgctttcccacttcatcaaaagacatcctgcattccctacatttacgcaatgtctactatttccgccttgaagcatatagttcgccgccttattgaacacaagattgacatcaaagacttggaaacaatcctggacaatcctatgccgctcgtagtagactcgttgaccctgcaagatttccagaagatccttagtctcaccatggttgtggataatgagttcgactttattgcgcctgtccccatcccgccagatctcagtatgttagcctggatagtacaaagaaatcagctaacctccactagaaatttggctggaaaaattcgaccgcgctcatggcaccagtcgcgatgaagccctcatccgctgcaagctaaacctcctccttgtctgtgctcacgatctagtattgtcgtcttttgagcaaatccgctcgacccattaacatatagatggaacggatatgggcgtatagccctgtgaaatggaaggggaagacatgggtactgtcggggcggccagactacggcatttggtacggagaggaggaagacatcgacttaaacgttgtcatcatggaggccaagaaactggccagtgataccgtagggattccgcaggcgctggcatatatgggtaagtacatcatggtatcgtcggcataatgcactcttgggctgacctgtcaaaagggtgcgtccacaagcagcgcaaagaacttggcaaggcagacaccactgtctacggaatttccaccgataccattactttcacgttcatgaagctcgacaatgagtctcgggtaagtgtatctaaatcgtgtcagtaaccctgattttaatgtttaccagtggtcattcaaaatggtcggtgtcgttggaaatgggttcgaacaagtgcttggtctgctagtctacctgatggagaaagcagcttcgatatcacctgccgcctctgaacacacgtctcgccggacacaagaagaatcatgggagtctgacctgatcttcgactatgaccctgagatggatgttgagacagatgtcgagacagatgaatggtttggtcccgcattcgtcctctaaccttcttttgcgtcttcctgctcttctttgctggtcgttcttccgtcttgatatccttcttcgttagttgactacctagttcccgcggacctacttggggaactatataagtaggccactcccccgagtcagacaatctttcatatatatttcaggatatcgcgaaatgtcctgacttgtaaaaatgtctcgcaaaaaggtctaattaactgctttcgcctctttgaatcaggaatggagagacccatccgattctcaattcagcgtttgaagcaagataccccggctactattgatgatgggcagtacaaggtcctcaggccaagggtggttttgaattcggcaacaaacaaccagggacaagagtttggtacttcgtcgggtgtccttgttcaagacacaggtggttataggtacatggcagctgcctcacatggattctctgtagaggggaaggtttatctccctagtgcctctggtcttaaaagagaacgtatcattgaacttacgcataccgatattgcgctcacgacagggtgcagtttgtgaatgaaccattggccctagttaaatatatagatgctgttcttacatacaagagcgcaaatatccaaaatgttgattgatgttgaatccttgattacttactgctcttgccacagtgcatgggtcgggggcattatgcctttaataattggcactagactattcatccgtatgggtttggtgaggaacaaatccataccagacccagtcgcgtcgcgttgcgtgtcggcttgtgcaacgccagtcaaggcagcaatcgtgacacggggtttggtttccagtgttttctcatactcccggattcgcctagtagattccaggccatccatgactggcatggagatatctgtgaagattattagattgacaatgcccgcgttaatgtttaaaaggcctacccataaaaatcattccaacggcagaggaattcgccttgaaaacctcgagggcttcttctccgttttgcgcaatgacataatcgcaattcagcttcttcaggaaggcaataagaattctgagattgatctcattatcatccacaagaagaacggttgttggagtggttgatatggggctattttcttttttgatgggtgtatcgtggctcgtggtggcgacttcttcggatggaaaaagatagtcgtcaacattctcccgacagagtctcaaagattcgagctttgctgtgttggcccgggtatgtgtttttggatctgctatcacttgggtcgtggattggtcactaccatgaccgtttgacgacgggctaagaagcgagtccatctcaggctcatcggtgctgatgtcggctccgaagctccctgagccacccggtctgcattcttcgcctcggagagaatcaaaccgcacctgctggcggttgatacacgattgtaatgcttttgccaacttgcgcggaccgcatggctggctaatgaactcgagcacatttgtatcgccacgatttcgagctccgactgacatcgagtgcgcgaccctcggggacgggcatattacgatgaccggcgaagggattttaacacctggactaggtgcaatagccctgatctcctgattccctatatccagatattcgtgagaagatatgcataagtcacagtgggcgaattgtgtttgtgaagccccaactaaaagaacttccatggagaagcaatctgcacacagcctttgtaacgatgtgcatagagctgtgtctaattcagaagtcccgaagcctaatattccaatggtcttcccgcatgcaagagatttcgctgtggtgatgagagactgattgttcaacttgtcaagattgtccaaagcagacgcttgattaagaatcacagttgccacgacttcagtgccaacattcttcttggagttgacctggatgtcaccgccaagggatgcgagtaatcgttgtgtgatgcttaatccaagaccattgccggttgtcatgctatcttcctgtgagaaagcagtgaatagtccatttttcaaaaattccgggtcaatcccagatccagtgtccttgacagtcacggtgactgttgagcttgtggcgtcgccgctttttccaaaattcactggagaggccttcatggagatgtagatataccccttgtgagtgaatttcaaggcattcccgaagatgttggtgaggataacattccaggccccagcttgtgtcaaaaatttccaactgtgggtgcggtcaatatccaagatcacctggactccaccccgtgtatcggaatgtttgctaccgaagatagaagcgccggcaataccccgaaggggagatcttgaacagctgaagaaggaataaccagcgaagaccgtttcaactgcgtcttctaagatagcatcaagttcgacacaggtgtcgacatcatttgttgaatgcaaaggagggcgggctgcggtaattttcgggttgacagaaattttaggaaaacgaccaccggggagtttggcgacagagtttggtcgaacatcattgatactagcatgctcgaggagttgattgatggagcctagtagtgtgtatgcacaagaggagattgtatgaacaaatcctcgttgtagcgcgtccatggcggtgtcatttaatagttctgccgttccgaaaatcccatgcagaggcgaccgaagttcatgactcagtccggagagcaagtctgatgttgctcgatcggcgaaatgagcgccgagtcgatgcacctccgccatgacgctagttccaaatgtcaagaggaatgctagctcatcattcgaagtgaagacacggtggtgttcttttgtccacgccagagcccccgagtaccatctatccttgtgcgaatcccataaaggtgagaatatgatgcttcgggattctggggcaattcgaagcaagctctgggcatcctggcgcacgagtgactttcgtgttcttttgtacctattgcccccgggacgtcgcaaaaatcggttgaccactccatcactggtatcatcagacgatattgtcccatcttcactaaaattgaagatcttcccttggggatatcggtgcaaaaggcccccgaggaatgactccgacaatgcgattttgttatcgtccaacgactgaccattgatgctggagacatccgaattggcaaatccgagtatttcgcacgggttcaaagtagttttgcctgagttttccgcttgttctggatcagaaaagatctgatcttcgaatgaaggttgcggggagcttcggaatgtggcctcatcacccgaagaacagctctcaaacccactgccttcagtatcagactctgcattgtccactaaagcttcctgggagcggaaattggcgttgaaaaagacaactgcctcaacttcgatactctcgcggacgagattggctgcacgtccaaatgtttcattcactttagcagtataatcatccttcagtgatgtctggctttgatcactgccagttgtcatagccgcttgggaagtttcttcgagttttggtagagccttgtcatctctcttggtagtcgagttgaatgaatgatatttctccctatacccttgcggggtcttttttctagggaaatgaagattgtatggacgggaagacaggtggcttggcatgccattctgagccacggtctgagtgacatcattcaagacctgcttttcttgctgttcacgattgacatgcccttctgcatggtccattccatcaaacatggggtgagaggcgtcagcgtcgagaacccatgacttgcgcagactaccctttccctccaaaaaacttccaaggccaaccatcatgcgctcactgcggaaacgttgggctttggagtgactagttcccagatagtccatgacggtagctgcgatatcgaccaggaattggagtgtctcaccgcccaggggctcgggctcgtgaggttgatcgtctaagatcgtataggctccaatcaccacacctttcggactgatgataggactcgatgcgaggaaccgaatgtttggaaatgaagtcacatctggatgatccttgaatgcattatctttggtaagatcgggcacaaccaagactccgtccctggcatttgacggatttggcgtagaatgcataaccgatttacacaggctgcggtcataagacatagtacaacacccgacccaaagctcgtctcgcgcattatgctcgccatcattctgcaagctcagggttcgagtggcttcggtgagaacgtgttgctcgtttcggccgaaaagcgagatcaacgcacgctgcgcatctagtcgcaaggtgcccaattgggcgaatgccgtcaggacagggtcatctgaggatcgagcaacatgttcttttgatagtgtagcaggcccgacgtgttggagggcgtgtggtttgagatggtagggcggtaaatacctaggaaacaaggtgtatggttagcctacagggtcttcggtcgagtgttatatagatcacaagaccgatgtatgagtacaatgttgcgtttacaaacaaaggtggtatattacttatagaattctcgctctctggatgtgccaaacttgacctgatacttctgagcgtgtggtgatgtgattggacgtgacattgcgccggcggcagttctgatatattgaatgcaataatgctaaaaagacagaatgtatgcttcgcccttggaatagcttggcggatcatcaagaaggctgcaccgggctctcggacttcagaaaatgagtagaaaaagaaagaaagtgagcggggcggccagacgagcttgcagcccgcaagcttccaatcttagacggctgagactttcggggttccgagattgggctcggcctagccaatagattagataagcggtgacatgggacgggaatgtttggcagaagacagccaatcagaggtgaacccgacatttaagtctatctcggctatgctctgtcattggtccaatcgggattgcaagatacgtccacgggttacaagccagtagatgagatcatgaagcaaaatatgatatgtagaaggagagtagaccaagactgtaagagtctactattacgagatggaattacagcccccagggtccttgagttctgcttctaaaggcgcttccaaggttctttatttagcatggcgaaattaccaaagagaagcgtggcaaaattagaacataactagcgattagttatgtcttcaacgcttatataataatgcatgcagctgtttaactagttagttaccatgctaaccgctggatgaggtactaacttgatcttaacttcgattgagggctgcaaaagaaagttgaagctgtgcaattctagaacataaattcaaaaaaagaaagatttattgacttgacatgaaagttgttcctatctgctataacaatcggcaatgcttcaggtagggggttgccaatcttatcccgaagatagctgtcgataacagccaggaaaatgcaagggggagactccttcatatgatgcgctcgagtatcgcgcatagaaatatcatacatgccgacatcccgggcgagaaccttgagggcttggaccaaaaataacctcggctagatttacagtctaattacgatactaacagatataacgcacaccattataattcacacctcgtttaaaggctctgatattcaattgctagctaaaagacagccgtcaaggtcaggccaacccatgctatttgacatcaaacaccgaagatcagaccaaacaaacatacccactgccaattccagcggagcccttatctccatacatctctcacagtcgaacattctagctatcgcaagacgaaacacggaagctacccatgttcctgctcaaagtgtggtcattccagtcatcagatgcaattccaatctggttgctgcaagacttgtcgctgtagacacgaagaacacaatcggaccacaagttgttctcccagtcaatagtgtcaccgcttttgcaggaggacttagtgcagcccttgttgtcttcgctgtcccactgcccgctgcaggtggtgaagatccaggcgttggccataggaaggatggcggcgatggcggcgatggtggtggtggtgaacttcattttgtttcgaagttgatggtcgggtttgagtggttgaaatacttaagtagggagttgaaaatagatgtggattgaatctttggtatcagaattgagatggagatttgattgtatctgaggggatgtcaggagcgtaaaagcaagggcaagtggttatttatatagctttctaggtggtatcgagtcttctattgataaattgaaatatgtaacttcatcgatgcaatacgagtgctaggcacaatacgagcatttgccagtgaagccgaaatagaaaacacgagagatcagcatcgtcaacggggccatgattccaatctccagggtcaaatacgataactattaccatcttcagtggatgatacaggtgattggtaggtacctagggagtccactgtctatagggcggaggtggtgaggtagcgatgtcgatcagaagtgaacatcgctctatttagggctagaaaaatgaccggggaatagatcatctatagcttctcgtattctcattttgaaactcatctactcaaagcagaagatattatttttggatgacctttataccatgctgccactcgcccaatacagacctgcaattgataggaggactaggttaacatattatgtctaggaaaaatcgttatcgtgaagatatttttcttcaagctcaagtatgatccagggtctatttatggatgtggtgctaacccccgcataaatgatcgacagggtccaaggcccaatatgcccggacaatccatgtcatatattttaagccaagactcgggttcagcctgcttctcttggcatctcgtgttcgtggagctacaggaatacgaaacgtaacacaacttaagaaatacctagtatgacgcacttggcatgtctgtcactaaaaataaaaagaataagcagcaacagggacagcagatcttcctgctgaatctttacaacaaaagagtgcattcaaacgagattattaagtacggggagagaaagaaaaaagaagggaagaggaccggggctgtaaggttattgtgtgtcccttttgcaaaccatgcaaatccttaatgcgctcgctttgttccatacgaggaaggaaccaacaatccttcagatcgtaacaagccggaagtccttaatagtctatgccaaattcaacgtcgctttacctctcatggatttaccgaaccagtaaaatatcacgggcattgggatcatagccagagtaacaaagcccagtaaagaatttccccacccataacccagcgcctggtacatgtagggaccagccaggggtagcaacgcgccgaacaaagagcgactcacggtaatggctgcgactgcagatgctgcatatcgtgggtatgaatcaatgacgtaggtctgcaaagtcccaaaaatacccaccatcccaaatgcgaatgggaaaagcccaattataggaacaatccaatgcgtgtgcgcttgaaccgaccatccgtaccaaaaaaatgatattggaatgaaaaaggtgaagaatatcgataaggggagacgcatttctggttcaaaactgccattgttgcggctcttaagtcgcagaatgattttatcactcagcagagcaaagagacattgcccacagaaaaagccgagaccaagcccaatgtatgacagtccactgatttgaatactccagccataggtattctggaaaacattggtcactgtggtgaagagaaggtagaggcagccgtaaaccgtggcgatatacaaagcaatgatcgacacgataggggagcggaaaagaagctgaagagggggttttaacccatttctgaggcgatccatttgctttctttgaggacccccctttttttcataacaactgtaaagatcaggtcgttgaagctctgatcgcaatgagtctgtcttgcgctgcatgatgataattgggtttgtttcgcgattgaaaatcgctacaagagttgccactgtgccacccacaattaaaagaacccagaagacctattttggttaatttccatcttttgagtagtcaaggaagtctactaacccatcgccatccggcgccgtgggcaatgaacccaccacaaattggaccaagcactggcccgaacaatggcccaaaggaaaatattgacattgcgagtcctcgctgctctgctgcgaataaatccgagacaacaccaccgccaatggtcaagcatgcagaaccgccaataccggtgaggagacggaagacaatcaatgcagacagattcggggcaagggcacagccaatttggaaaaccacgaagaaacaatttgcgacgctgagtacaattctccgtccgtaaatctcgcttagcggggaaaaaagcaaaggtccgctctgcgctctttgttaggtcaatgtcatccagagagcgcccaggaccgtaatatacttactccatatccaaatagatagcctgtcacggccaatgactcacgaagcgaagacttattgccgaactctttacttgcgtctgcaacggctggagcgaaaacagatgatgcaaatgggcttcgaggtaggtggtcaggataatggacgtataattaaagttggaagaatattgcatacctaatcaatgtaatgatgctgacgagtgagagaaggaaccactttcgtgtagcagggtaatttctgtatgaccaattagatcttaacagctgtgggataacgtaaattggacgtaccttgggttgagagggtcatcttggctatcccacccaactatgccggtttcaagatttgttagggggaactgctcccgcttgatagtcggattcacctgattcaaaccagccaatcagtaaaatcaacgagaaaattgcatagagcagataaaatcactttagcgttctccatactgattactatcagttgtcgattgcgattttgtggactcacaactgtcgagatacaggatttcacaaatcttccgtagacaaaaggagtatctgaataggtgacatatatataagataaaaatttaccatttcaaacaatataccattttcggaaaacaaatggaatcggacttaaaatacgggctaacctaaaaagcggactccggggaagtcttgggccgattgaagaatgcatgggctttgccactaccaacgtgccgcctcagccgagtgcgacagagtgcacgatgaccatggatcgctatatttctaattcccggctaatttgtcttttgagtatagttcctgtgcgtgcctaccacgactagttccagacttgtcgagatatctagaccactatgatttggacgaagctattattcggaaaagaacgtggaactagcatcgactttctccagtgatactgaatgctgtgctgattagccatgagcggtatttataagtacatcggtttcgttaactacctctcgtctattctaatttgacattggcaatataacctatatgttcatcgcagatacaacttgagtaactagcaacatggtttaatcaaatgaagacgaagagttacaatggaaaaaccaccctcccgtttcctccagcacaaaatctgatcagatgcgaggtcttatgattcgagaatggtgacgaggtacagaagtccatcacagatgcacattgaagaaatcggcaatttgttcatacctggcgaagttattaacgataaattgcgcgcgttagaatcatcttgcttacccccttgtgaactccttggaattctgctcattttccatgttcgcacgagatcccatccacccatggaacattgtttcgtatagttcaaattcaacatcaacattagcgcgcatggcttgctcatattctttcaaaacatcggcttgctcttccggggacgataggcagatgtgggggatgttggtggctttagcgtccgcaatatcaagaaggctgaagcagaacatatcaatactgaagaccaaaccagaccacaagagactcacgatgggtgggcttggccagaaaccttaaaataactccgaccaccagaagccaaagcagcaagctgtccaatacatcagtaaatttttatcgtcgtgggataggttttatccataacctacctttcctccccagcacagtccaagaacaccccaactcttgacttgggggtacaaatcctcgctttgcttcatgatatccagaagagtagataggtttttttccgggctagcattctccccaaagaaggtcatcatgttgtttcgcttctcctcggtgtccatggcgacccaatccatgctagctgccttgcctctaaagaaatccggaattatcacgagacattccagcttttgtgcgaggatagaggccccttgtatagtctgcgggtaaagaccgaaaatgtcatacacgagcatcactccacgttcagatgaacggtcacccacgatatctgccaatttggtttcccgaattagctacccatatgatttctttgcttccttcatattggactcacgcaaacggacttccgcagctacatcagtgccttgctcggtagatatgaccggctttccaatggcgggtgttgaacagcatgatttggaggacattttgggtctttgtaactcagcttcctgtctggctaacgaaccggacaaatcgagcattcagtgttgggactctatcgtgggaggcactaggaggtttatataagtgtcacagcaagtatccatttgaaccgcttcgtcatttgtccgtgcgcaaagtctcggtattaccggacttaaagggaatcgaaagtctgccggactctacaaagcattcgttttgtaactacatttagttcaagagctatgtgtagtcgacatgtcccttgctcaataccagaccgtgcatcactttgatgggggtctctcaccttctcatcacccaagaatgcatcctgaatagtgggatagatatttttctattttggagcatcgatttcagacgattgtctttcaaacatgacccttgaggaaactctattgacgccaagaattgagctcggaccgccatgaaacggcgctaacccaaaaaccggacttagatagcacgtcgggattttgagtctcggacgcacttgcaaattacaccgtgaattagcgctatcccaaaaagaaactgggcaagacattgactgtgaataggcgataatattcccatcgcttaataggccaagtaagtagtaatacgaatggtgaaaaagagtatttgttgaaatatcagaaaacctatgctacttgtattcttaaaggctcataatcaatccaggaagaggtttcagtattgtggcattcttcaaaagcccgtgccctgaaatgcggccgcttattgccgagtccgtcgcatgtctgagatgaacagctttgtgtataagacttgatccggatcctcgcgatagaagagcattgccattttatctcttctggccagcccttccattcatctgatccacctgatctgacctgttcgcactttcagggacaatcaagccgaaacataatgcaaaatgttctttttttcttcattgaagtcgcattctgtatggtgaccatcgtgtcagctcagatcccagagtcggacaccgttttacaagtgcagtacgggagtgtcacgtttaagaccggagagaagctgaggttgagtggtatggaatagtaacaaggcagaagaaagaccagacgaagctgatagagccgatcttattccagacattacatcagcccccagtattggtctctcagcacctgccctgacaggcacgtatattgtcatcatggtaccgccttcctgtccctattatacccatccacttcctcgacttaactcaactcagatcgatcccgacgcacctgaccccacacttcccatcttcactcaggttcttcactgggtacagcaggaccttatcttctcgccaatggccggaaaatacaatacattcgttccccttattactccgtcacccgcacccgctgccgctccgtacctaccgcctatgccaccaccactcttagctccacataggtacatccaaaccctattcagacaacctgctgagttctcaataaatgacctcgatctctacctgaccgactctatcttgagatttggatttaacttatccagatttgcccaggaaaatatgttgggggagcctattgcatcaaatttcttcttagcgggagacgagactatccaaatcaggtgatagacttgctgaaataattcaaactgcgagtttcccatatttgccttgtttatcggtccttgggttggtccccggtctgaatagccccttacttaagcgtcaatggaaccggaatcatttacacatgccgtaggcaccctaggcaattctaaattagattaggaggaatattaacgccagtaaatccgcaatatccgctataaagatgggttttccaaacccaactgacgattaataaccaaaacatgataaccaagtccaattcgattcgcgacagtctcgtaaaactggagtgggtctatacatcggccacgctaacccaaaatacggggtttacttactccaagggtgaagaacttggcggctgttttcctaaagccgcatgcttaactccgggaggcagtttcctgatctggtgcagattaaggtctagtctatgtcgttcggattagacctcgtatgtaggccttgctgagatggaattatccccccggtatcagatcaaaatgagtcgttttcttacacagagtttaaggcttccgtagacgtaaatgaagtgtgcataagaaaagggatgcaacggatgtgccgtgcttgccatattccggttgtcacgtgatagtatctgagataatgacgccttggggtggcaggaggtggccttttcagcttcatgaatgcccagtacgattaccagccatcgcataggcggcccttttccccctgaaattatggctacccacagctttcaactgcgtggaaatttcggccttggtggaccgtctctgtcaagcaactcttccgagaacacccaccaacagaagcagtctcggcctggaggatacgaggctaacacatctcccgcaaatcctgatatccagcacatgtcagtccaaacaaccagtaaaaaggtctcttgtacctcctgccgacaacgtaaaatcaagtgtgacaaagaaaatccatgcagccaatgcacatcctcattttacggtaggacgcaatttccataccaaaacaaaacattgcattgcactgggaaaacactgatactgaaactttgaagattgcatataccccgaatcttcacgtaaacgacggcggaaactccctttggagcgaatagagtcacttgaatccagactgaaagcgatagaatcatcgatctcaacgaacgcggaaagttcccccatgattcctagttccatgacatcggaaattgggaatattacgaataagactcctctggctacaccaaacgaacataccgcgcccgcagagcttgggaatcgcgataaagtataccacgccgttgaacaggatgaaatcgagtttcaagggtattctgcggatcgatcttttattcagtgtctaaatgcgaagctaggtgactggcgtggcggtgatatgacttggcaacagctcccctctcgtatatcagcgccagcattctttgaagtcgagggtcgaactcccgctcgagtcactttacctgaaagagatatcgcagccaggctggtcgacgcagctttggatgcacagatactactctgccttgtacaccgaccaagctttgaggtttctttcaacttggtctattcgcttgaagaagccaactacagtgccaaagagcagaaatttctaccgcttctctatgccatatttgcgtatgggtgcctggtcatagaccccggctcgtacggtcccgattgtgataaaaaggtgtctcaggggtattgatttccaaagttttcccgtattcttgctcaggctcttacataaagcaggttggaattctacgcaaagagtcgacaactccagaatcttgccgagtgcagagatttaacatctctccaagccatcatgtttttgaacctctttcttctttcgtccaaccgaatatcgacgtgctatacatatctcagtgcctcattatcgattgcgctacgcatgggtctccaccggtctctcaaaacgggtcaggatttaatttccgaggaaatgagcaagaggatattttggacgctgaggcttcttgtcaatgacgttgccaccgcaagcggtatgcctgttcttctgagcgatgatgaaattgaccaagagcttccaaaagagacaaatgacataaatattgaaaagatgaggatttctccacagccgcgcggtgagatatgctatatatccggtgcgaattcatacaagcgactacaaatggttagggacaaggtgacccactgtgtctactctctcaaaggccagaccacgtctgatatgaatggtttaccaattcatggtgtgagcttggcattgatacacggaatacagggtgaccttgacaattgggtggatgatatacctatgggttatcgtcttgggacctgttacaccgaagccagattgataaggtaggaaatttggacatcatccttcacttgcgagagagcttgctgatgactcccagggcccaatttattctagctatgtcatatgctcatgttcagctctatctctatcggcccttcttgcattatgctgtgagatctctcaacgagcaggttggtatgtcaacttatgcgactgcatcggttcgggctagtgaaaatattatcgccctgtgtgaagggatgtatggacaagatctcctcaagggtgatttgtggcctgtgacgcacatgttgacaagctctattctgacaattttgtattttgttgtggtttctcgagcctcgcctaaaacagacatgcttcttgggagcttgatagctaggcgaagagttctaaatcaccttgctgaacatagtcttttcgccaatcgaggtaaagtcatgctgacggtgagcattaatcagcctgtggctccttttgtcgctgttcactaacatgtacaataaagatcatgatctccaccctcccgggaactcttcgacatatccaagaaaagcttcttcgctcggatacccaagaactccccgggcttcaaaatgagaggcttgcgagctattcaggtccttttgataatgcactcaattcccggctggcgtctgaaaccttctcgctgtctccaaaacaaagtcctgtcggctcattgccagcctctaccgccgctgagtggggagcaaaccctagtaaatccctcaattcatcaactgtgctcagtgatagccaatggaatcccagggtttcaaatgcacaacattcgacaatcggtactttccagcaagacttggctggaacatcggaattttgcaaagctcatgattcctcgaatgaatcaaatagccatccgattattggggaagaccagacctatcctcgaagtcagaacttggaagagatgggagttatagacgaattccttcaagctcagccgttgaatcttcaacaagactgtattgatgagacttggttcagcgctttgaagatggctggcttggattgttcagatgactttcagagttctatttcacgcttggaatgtttagagcagactttcgatttcgatggctgattatggcgcaatagcattatccccagagttaggggacgagcaattgggcattcttttctccggcggataagaggggagtcgaattacggcgaagtctttggcgatggttttggggttggggcttcgcaattgtcccttcatatgcctcggggcttaatgggatcagcttgtgtagtagattcccacggattaccacaccaaagatccagaattagggattacacattgttactcaactcacggcgccttgccggcagttggaatattggcttgattatccacatgtatgggcgacggatcggaccactacgacaaaactaatttttggctcaccgctctaatcaccgcctgtatgattatggtcttgggcctgtatataatattgcaacctccatcaattaacattgtaccttttgaagagtagattacctctctctataatggcagcactatatctgagagaggggagtgtactatgtgaagaatgcgtatgctctggaaaatatcaatttgcgtagggagaagatggtggtatgtatgtatgtatctggtcgacaattaataagaaaaccaagttaagaataactacacagaatgtattaatttgtataatacaaaggcggaaactccagcggtgaaaataatatatgtattactaagcatattccagtttggcccatttcggctgccctagaaattcttgacacgaagattccgaacataatctacgttacttagcgtgatcgctggaatcgtgactacgtttactggatcctcgtttgaaccttccgacctcacaatgcctgcactgctctgtttaaaaacaatcccatcacgtggcatccgcttccgatttggcgacgttatccccacctcccgacctcgcaatccttggtaatattatatggagacactttagagtacgtagcgacttccgtacatcaagccaattcatgtcgcacattgcttgaaagtgtggtagcagcttcttcgtgcaattccgcaataccattattgggtacctcttgaattagccccccgtgcacttgatcagtaacagtgctatggccatacaaatgatcggcagggtctgactgtgaccccccggtgtatcccttttttccgggctcatcctttcggacggcatcataagtctgatctttccatttgcggaagccccaggagatagcgccaataatgagtgcggcgccaccgacactgccaacaactgcactcgcgattactccgtcagaaattttatcactgtcaccgccaccggtagacgtgtcattggctttggaagcagcgccactgtcgttttctgtgttatttgcaacactaccggaagtctgtgaaattatcagattggacaccaggatattcacgacgttcaatgtgttcccgaagctgggggcgtagtcataaacagaagaggtccagtctgagccgcatacagtatgattgcttgtcccgccgcattgctgtgctagcgtgatggctgtgcggcgtagtttagcattgatcctgttggcgacctctggcatcaaatttgatacactcgaaagccataaggctaaaaaccctttacctgcctctgttgaatatcgggcctggttcaccgcaccaagtccatcaaccagatcccctacttccactatcatgttccgggtgaaaaatgatgttaaggtgttgtccaataggccttcgactcttgttttccatagatcagtatccgtctgtacctaccttgtcagcactctatagacccttttggacgacaaaaagaacaacaggagaactcaaagagcaaggcaaggagcacttctctgcggaggcaactcaccattttgaacatatacgcagcgccgctcagccacagtccataagaggatgctaacctccaatccttcaatacaaaacaagcagtattgttatccatcccagcaacaagggaattgatcgtccaatcgctctcgttcaggatgtgatttttcacgctccacgaccaaacagccgaagcccgatccgcaaaaaaacgtcgttgctcccccgacgaagcgtaagcaattcgggaagttagctggaaatatgtaccagtaaggtacccaaactgttgcccgatgaggttttgggagtctggtgaaagcccatcggtacaaaagtgaccgcttttccacatgagtttgctgtgcagatttacagcgcaattaaaccaagactccgacgaatcggtcggaaagcctacttctgcggcggtcatagcggctagaccccagatagcggtgcttggtcttgtgttggttgaattgtagctcgaattgaatattgttggtctttggctgtccatgcggtcaatgacgaggttgttgtaattactgttcttggtcgtgtcccagaaagcgagcaaagtaatgtataccgatgcctcatcctttacaccgtgaaaaggatcatcgcttagagggctcacgctgccgtcgatggtagaattgctgagaaggttcgtgacttggattgtcgcagcattttgaattgattctgggccctattagttcatgtgctaaaccatatgacactttcgtacttggcaacatacctgtgctattgatatctaaatcaatagcagaaaccctcgtgaggctgctcattaaccatgccgcgtagcctaggtggcagtaaatcatcgcaatatggcgaacggggatgatttacaggtaacacgaaggagagacgcgattagggatcaaataaacaatgcgctgccgcgtgtcttacgttacaagatgtattacacccttacctgcgttccaatcagggtcccactaaagtggttcgttcacatggtataggtaatttcgcgggtgtcgtgccaactgatttgatttttcaataccgtagatattttatcttaaaagttattcacattaccaagctgggttgaatacctggggtactcattgaaagcaattcaaaacgtagaacagaaatgcagacagctgagttggtccaagtcacagcaattagatccggacatgtgatttgaagcctgtaaccatatttcccgggttgtatgctatggcagtattctgtaactatggcatccttataatttaacattcctagggagttgtgacagtgatgttcgtgatcgatcagctttgattccacaacaactctcacacttggggctttgcggaacctcacctaaagcactctagtccttattaggaccgcgactcgcccaaatctcatctaccagtgtacccttgtgagtcaggttgaaatacagatgtaattaatatctggcgacgtgccaatacactggcgaattgggaacggtacctcaaagaaatgtctaataactttgaattaattatcgtaaggcttagccgctcgtttcgttgataacgtcaaaagctcgaaaagttgttgcgccaactacgttggattcacattcattgctcattcttagtggaaggagaatcatacggtgcagtgcgtaggtttataggtactggaaaaaaacacctagctcgattaaaaaagtgcgcaattgtttcaggtctaaaaaccaatcgcaggcaatcaaaaagcgaatccctctgtcccttgcgacaaaattgtcaatgcaagggccacagtccccattcgtgcatataactaaggaggtcgccagggttttatggaaagattatatattgcacatttagtgtcacattcctcacttccaatgctattgcgagtcacattctcgccagctcggtcaacttgtttgaggtgcttcagttttcctgtatgactagagactgaagttcttctatgatggtaaagcatccagtataggagtaagttggttaaaacttctggtggtggaacaaaaagctcatttagggcagaacaaatgactttgagcgatttattagtgccctcgggcagtcaacagggacaagaagagttatggattagcggcaacggatcacctagcactgcggtcttatacggaacgcattagaccgtagcgtcaaatagagcccgtcggcgctcccttggacggacgcaatgtgtctttattgcactagtttatatacagagggaaggcgggagggacaaaatcaagtcttgactgcgtgtgcagtcagatacacccgcaatcatcatccgcgcaacggaaatcggatctttgtttatcagcccctacgaatcgcggagaacttaccagtcctcgtcgacgtcgactttctcgcagagaatgatgacccgatggcagtgagtgcgagagtcacttgtgatctattcttgagttcatacgcgctgtttgaacggtttccggataccatgaggtctctcaagggtgctttgatgcgcaaatggcatgatcttacagatgaacctgatttgacatgtttgatcccgttacttcatggatatggcccctttgatacgaaaacaattcaccgtcttcagatcgagcttacgacgaagaagccttcatcctcgtcaagcccacattggctcaccagctgaaagccacagcggcggtagctcagctacctccgagtttaaaaatgacgaggaagtagaagactatggtgtggtaagctttctgccaattgaagaaaagaaaaactctggtctctacaacatgaatatgctgtgtccacctttccccgtgcttctccagggtatcaacaagatttcgagtttcggccagtctcaaaaaaaatactaccccctcatcatttacctcgaattctcaaggctcgttcgaggaaattcgcgtaagagcggctggatcagagtctggatggtcacgcgtctttgccaagaagggaaaatacatcaatgatgaactcatcgcattccatacgattggtaagactgtggcgatgaccaaattcgaatacgtgctgcttcccatcttcgacctggtcaatcaatatgacacatagaaggccaatctctcagtggacgttctgagttccgctctattcacttgtgcgccgttgactagatatttccgagaaagggcggatatattcttcctgaacctcgccatcggggtccgactggcgaccgagctgaatgaagtattgtccgaaaccttcgggtgggctggaatttaatgctgggaggaacccagacatctctgttggttcgaccgaaggcatgcagctacagctattgccactaccagaagaaaacaaatatttgtcttcacagttgacggtagatctgaacatagatttcttcgccttcttgttctcttcaaacctccgaccggacgatgtctttttgaagaaaagccgatgaaacgtatcagcttcaacagcggttttcgcacacggggaagagtcacaggggacaattattcgtcggatttcggcggccaggcgggctggtatggtggtattgaaacccccctccccccaagacttctgatccaatttgatatgattagtctgatttattgactttggttagatttccccccacgcatgcattcgggaaagcatctttgccgagccacggatcgatcaccacttcgcatacgcaggcatcttgaccgagttcgaactggatacatctagattatcggtcgatgtgggatgctgcatgggcactgacatccggaaactggattgatgggctgtgtggttagctttattcttacaatcttctgttcaatgcccgacacaattgcgtcaattagatatagacccttctgatcgaatgtaccagggtcaatatgctatacagctggtgtggggtcgatgtcactttatttttggattttctttattttcgttttcggcataatgtacttttgacattctacatatactacaacacatattacagtgggcacagctggaatcctcaagtagtagccttgtctcttaggcagagagaaagtttaggggccttcatgtgaactagaatcccagagcaggacttggaccagtcaccacagaatgaaaaaggagtttacaggatgctcttgcattagaggataaggatgtctactacggtttgtataatctccataatagctgacctctctggatggttggtgttattgtgtcgctctcgtcttgtctgttatgccatactgcctaccgtgcatatccctcttcaatatatatatactgtcttggttcagcgtcccaggtcagtggtcactttatacacaccaaagtatgaggtgagttaaccaatcgtcattcactggctcagcacattcctcacaaccatcttcaagtccaaagcagggacactcaggagtttatttccagatggatcgtcgggagcgaccacaatatgtcccatcagcctggaataggtgcacggccaataatttcaagaaacagtaatgatagccccgagcaaacttctcacgaccttgcgcgagtacgtcttatgtgttggcacgggtgattctccatttagacccgctttccacttccagtatttccaagatgtcgttctgcgttgtagtcaccgaactgatgcaaaaaaacttgttggccattgcggggggcaaggtgcagcgcacgccctgttgtaccgacgatagcgttcagaagttggttgcggataagggctcgtttcccgaatcgtaaatcacggcggatttggcggcaaggttgaagccgggggcgccggggtttttgagcaagacctggaattgctgcgtacccaaggcctttgaccatctcaaccccgagaaaaccccgagactgcctcctacctgtggataattgtcgctagaacctatttagttaaatatgtgctagcatcgtggttcatggtctgtctccacgcaccccaattacgacgaccttcttgatgggatctatgctgctatagagagagttgtagtgagaaaaatttctcgtatcggatgagtcaacaattgaaaattcaggggttgcccttcaatttcaaacaagtctaacgcgggtgataaaagacttggcgcttttaaatccgagtgacgtcatatgtaagcatactagtagggacatgcatgagcttaattcgacccctggcggcttccaacgtggttatttgtggaccatcgagatcatgaattacgtttacctcccgatacggtcccttttgtcatggagtaagggatgaaatctcttcacggatatattcctacataaggccgtgatgacaacccacttcatggtggaacctttatcagtagccaacccgatgtccacaaagcatcacaaatcgagttttgtgagaactttctgaaaccgggccgattatgacggcataggtattcttcacggacataatcctaaggccgtgatgacaatccacttcatgttaagtggaaccttttcttcagtattagtcaacccgatgtccacaaatcatcacaaatcgggttttgcgagaactttctgaaaccgggccgatcatggtggtgtaactataaaggggatttaggctgaaggcctggggaccctggtagaatcattcaattcaatatccattctcgatttcatcaaaatgaccgattacaagtttgaaggctggtgtggcctcggccctgaggctggcaagggcaagatggtctggcaggagttcgagcctaagccctgggaggagacagacgtggacatcaaggtcacacactgtggtatttgcggttcggacctgcacactctccgcagcggatgggtatgttttctttcagttgctctgttgactcggtttctcttttctttgaattacttcgttgtctcagtttctcgggtgaattgaaggctaacgtctcttgtgtatcgtacaggggccgaccaaatatccctgctgtgtgggacacgaggttgttggcacagccgtgcgtgtaggtacgcaggttaagaacggcattaaagtcggggaccgtgtaggtgtgggagctcaaagcggagcttgtgggaataaggacggcgactgtgaagcctgcgcggcttcactcgagcagttctgtaataagatggtcggcacatacaatggagtgtacgcaaatggaggaaagtcttacgggggttatgccacttacaaccgctcgtcctcccacttcgttatcaagatccccgacgctatttcctcagcggacgctgcccccatgttgtgcggtggtatcacgacgtattctcccttgaagcagaacggctgtgggcccgggaagactgttggtgttgtcggtattggtggcctaggtcactttgccattctattcgccaaggcccttggtgctgaccgcgttgttgctatctcccgcaagtcggacaagaaggcggacgccctcaagcttggggctgatgactttatcgctactagtgaggaagaagattgggtcacccgtcacggacagtctctcgacctaatcatctcgactgcctcttcttccaagatgcccattaccggatactgcagcctgctgcgtttccgtggtaccttcattcagcttggcgccccagaggatggtggtcttgaaatccctttctttgctttgatcggcaagggtatcaagcttggtggttcgctcattggtagccctgatgagatccgcgagatgctggaccttgctgctgctaagggtgtcaagccctggatccaggaacgccctatgaaagatgccaaccaggccattgtggacatggacaacggtgatgctcggtaccgttatgttttggtcaacaacctgtgaatcagcttactaggaccgatgtcatggatatgagctgaaatgatgttgtaactagcggtttgacgtttactacataatagaggtatatgagagtttagatcgtgaggcgtatttgggctgctggggtctttgtccctgcaatttaattttctctgattcatggtgatatttgactcgaatgataggaataatccgagttagcaaggcttgaatcacttggacgagttgtcatgacttacctgcttagaagctccgcaacgttgactcaccgaaaagcgcatacaatatcgtcgctaggaaatatgaatttttttttcccctggcctcgatttagtattgtctagactgcggaaagtgaggtcagggtcgggcgaccgccgacgaatcacctctcctgttttccctccagctggttgatccgatgactatatctggacccactctgctgaataaggttggaatcgagtcgagggcttagttacattgatcgaagggcttaagccttacatacagctgatcgaatgttagaatgggaccgctaatttagcgtgaaggaaaatatattaatccgtattaatccgcgtttcgaccatctatctgctcagaggggtcttagtgaatgtcgagatctctctttactctaggatgtcttcatagcttataataggcgttcataaagaccgcgtgatcattatttacagtattatctttaccactaaatcctatcttcttctatactaaggtattataacccctaaaaaatcccgacattcgctgatgtctaacgttcactgagctctcggaactcggattaatacgtgttcctctgttccaaaaggcgctaaaaattagctgtcccatctcaacattcgctcagctgacagatgaagggatgctttgtcagcatatgatggatgacaaagctacccacctgacctcgggcaggacctgcctgcccaggtgccctaccctgtccaggaaggtaaaagcgaggagtcgcatcaaatatatatgttgtagtgtttggcgaaaattgttatgataatatgaacgactaagtggaataagctcgattttagggtgggttttaatgcccggggctacgactaacttgaaacttgctaactaaattgtccgatagaataaccatccattcctattgcgctgaacctttccttaatcttttcaccgaaatgtcaaatcagatatcaaatcagatgtcaaatcaaaagacccttctggaagattttaatatcggaaatttcgataaacaagcgctcaacaaatcagtggaggcaaaaaccggcgggtcagtcgtactcgacgaaaaccaagccactataacggatttgcagagcgtttcctggcctgtcgcttccgctcttctggtcaaagaaaacggatcaggcggtagaattcaaattcatgagcaatcaggagagtgcgtgttggtggtgatgacgggccctcaatttgacgaacacttcgccatcgcttggctaaagaaaggccaaaactttcgtttttacgggaaaccatcagtctggtttttcagaccagccagcttatagcgcacaagctgttcgcagaatttcaaggacacatcgatttgaaagtgacctccacgctaggcccgccataccaaggacaaatcatcttcacagcaggaggaatggctgcttcgcggagaataggagctatggagcgcattccatggtccacagtttggccaagtgtgtttttctcaatagccggttcgcaggaatagaggatctctaggaattcgttccgctcaattgaaacagttgactgaatcggttgatccgaaggtagaccgaagctgtattcttctatatactattagttttagctcatgtttaccacttcttgaactgaccgatagttggactcaattgaacacccttgtgatgcgactcggtaataccttgtaaagctactggtcctccaacgtcaagagcagaagcagaagtgtcttgtttgtaatatctgagtctgaagtgttggcataaagccaacgcaactctgcccggggttctggnnnnnnnnnnnnnnnnnnnnnnnnnnnnnnnnnnnnnnnnnnnnnnnnnnnnnnnnnnnnnnnnnnnnnnnnnnnnnnnnnnnnnnnnnnnnnnnnnnnnnnnnnnnnnnnnagccaacgcaactctgccagggtttctggtttctcttgaccggcccaccattccatggttttaccgatccatttaagttgaaagtcggataatttcgtcttgggaaattcgagcagtgacaatactaaaagatcggacgggaatattttcatcatttctcgaatattgccccgcgatttttcatcccttcgtatagaagtacgagttagcttgtcctctcttcactcgagctacccaacgaccttgtgtgacgacttcccagaagttcgtcagtcattgaatcaccattcttatgaagaagggcacaatccttgccagcagactgcataatttcaacacagcgagaagatagaatatacgaccgagccaacatgatgcttgtgaaatatgtgggtcgcaactcctgtgatgcaagcgtgacattgcatactggttattcaatcaatttgtagacagaaggccgcgggaacccaagaaattggagataatcaataggcttccattgttggcagcagtcggggctatccgtagttttaatatgcaaggacgaccgtaggacgagcgggaacttttttccacctgtcaaggcgacgttctcggggggatggtggaagaaatcaggaacgtgctttagcagacctagaattgcctgcaaatgcatgtctagggacttcgatgttccatcatacctggatgctgcttggctccaggggtgtagactggcttggtgacatgcctggaagtgatcctcaggcggacaaacaccgtcaccagggtaccaattttcaacatcgctggttgaagaatcggatacggagctcgactgctcgtcatagtcttggatgaggtggccgtgttggttctgctggctttcctggctgtgcgattctagtgcttccatttccctttctcgatgagagacttgacgaagagacaaggatcattggggagatttgtagggtgtagaaggggcatagaggcggtgaggtagagactccaggcaggggctgccgctgcctattttcagccccggctcaaaccatcaaatacccattatccaatgtgccactgtaaagtaacggaagtatgtgggttgagattgaaaattttgcctaggagatcagctggctgctatcaacatgttactcataaactattcaaaatgtctttgtaagtaattcacaatttatgtacccaaggaacgctgctagatcccgacaataatatctagcagtttttgaactccgaattcgaaatatctgccacctggtcccttgaaatggatctgacattcacatggtggacatccattggctgttggcagcaataccggctcggagagaagatgacatcgcaacacctgatcgaattgggtaattttactaaattatagggctagtgagaaatgtcactcaaatggcgctatacccgaagcagtttagaggatttaggggcaaacaaattctgcctcaggccataaacctattgcctgaggcagacaggtcttctttgacccgtgagccgttaggtcggtgcaaccttcttgtgtattgacttttgaatgaaccatggaagcatcgaaggggaaaatgacgactgcatagcatttccaacgaagaaaaaaaatggaaaaccggaaaccgagtttatctgcaccgataaactctatgaggtcatctagccgtaggtccaaccaccgggcaaattcaattggttcagtactataatttagattgatatttcatgtctagctaggaatatgctgtgctttatattgccatatcttttgcatagcatatcggtataagatgaaataagaccaaataataccaaatgagatcaaataagggttgcagacaacgtggtccccactggacacggggcacagtggacgatctctatcttaaaagtgaccagatggatccctccaaccctggaagtgacccacaacgctcagactttctttgatgaggattcctattccggttagacaagtatggctgtgtttcccgtcagatagcgagcttgaatctactttctcttgactccctgtcttgcgcttctctcttcttctcctcgttctgatcaatgacccttttgaatatgaatgggtgaacttcctatacccatgcgcccctttcgttagaccataaaccctaatcatcacgacgaggtaccccgccaccggatattaatcctaggggcggtatgatcggatcgagctgccagcttgcgattatcacgaacaaacttcatgcatactcaagcaacgattattgagagaatttccgcgttcaggatgccacatatgatgacaacattcaattcgcgcgcaggccgagtcgcggtgctcgcagtcttctttatcctcgcccttatctggctcttgcccagccatgatgcccccttagtgtcgccaatcttctacgccggggatggatacaatagcagtcaccccatcgatgctctgatcgataccgcaaagaccgatctccacgaactcctcggaacacaagcgcacgaccttcaaactgccgcagaccaatatcgagcgcggcgtgggagacatccgcctcctggttttggagaatggtaccagtttgcaaagtctaaggattcattgattattgaagaattcttcgatcagatctatcacgacctgactccgtactgggctctcgacccgaaggaattgcgtcgacaagctagaagcatcccgacccgtatcactatccgcaacaaaaccgcgatattgaaaaccgatgagccgagaaattggatggactcgtggtatgatctggtcgcgaaattggaggacggactccccgatctcgatatgccaatcaatgtcatggatgaaactcggctcgttgtgccctgggaggaaatcaatgagtacattcagaaggagcaggcaaatcgcgtgatgacgaaaccgagccgtgttatccccgaatacatgtctttgaccgattgggataacgaagacctggaaccttatgatcctggatttgcaattccgggcgagggaggttactgggagatggctcgggttggctgcccacctggaagccctgcacgcaccagcaccctggccaaggttgatttcagtactcctccttgggaatacgacaatttcgagagaatgtcataccacggttatgtatcaaacttcacattgacaaaggacccatgcgtgcgcccagagatgcaggtattgcatggaaccttccttgagcccatctctgtttcaacttcgcacaagctgatgccattgttcggcgggtccaagcttcccatgaacaatgagattcttcttcccccggcgatgtactgggcccagaacgaccattattccggcggggagaaggagcacggtggcccctgggcatcgaaaatgaataaggctatgtggcgaggtgctgctactggcggccgggctcgagagcccaactggacgggcttccaacgacaccgattcatgtcgatgatgaacgcgacatcagtggctcaggccgagaagaaccaaagccacggcatcaacttcagactcccaaactatgccgattacaagttgaagggcgacgggttcatcccgcagcttctctcggagcatactgacacaggcttcaaccacctggtttgcacgccttataatgaatcggacccgacgtgcccgtatcttgatccatatttcgaggtcgcgcctggaatggcaatgaaggatatgtacaacttcaagtatctgcccgatcttgacgggaactccttcagtggacggtaccgcggattcatgttgtccacttccctccctatcaaagctactatctacaaagagtggcacgactcgcgactgattccgtgggtacacttcgtccccatggataccacttaccttgacatttatggaattatggcatatttcctcggcggccgtgacaaggttgcccgtaagattgcgctcgctgggaaagcctggggcgagaaggtcctgcgccgggaggacatggagatctatacataccgacttctattggagtatgcgcgcatttgcgatgatcagagggaattcctcggttatgtcgatgatctcaagatgtgattgcttgttcatacgcatacgtacaaatcgactctcgcggtcaactccccaatcctccccagcagagtcggtttatcgggcatgattatcggactttttttcataatcgaaaaagatcgttccgcctgaatccttatgtggcgccctagcctaggcatcccgactcctcgggctttctcggctccatcctcatggcactggccttgatgtctccatcccggcgttattggctttctcagccttcggtctttctctcactcccttcttattctttaatatatactaccttcatgtgatgtttgtttttacttgtcgatgattactgataccatgtcaatattcatttctcggccagtgcctgatgtacatgaaacctgacgacgatgtacataaataggtgatgtttgtcatttatgattttttatttgcttcttacattcctctttgcacacagataattcttacattagaaaagcactatactcgaactataacacgtcttactccttccactcatctctgccgagcctaacaatatcagcctgttccagagtccaatagctcgacggggctttgccctcttcaaccaaacgagcagctgctacagctgctctaccaatagtagtttgatcttgacctgctcgcgccagttagctctgaatcttcgtcaacattcgcgtgatcagcatagccataccaactttgtcctggataccctggccaagcttctgaaggccttccacaaacttctctagaagaaaagacttcgacttctccctcccaataatcatcccgggtctcagaacgatagcattctcaaagttaaactccatgatggcatcctcgacgccaaccttcattttcgagtatgggacccagccccagagaaggcttctcgtgcctccgctggaaatgaaaacgtacgtcttcacgcccgcctccttagctgctcgagcgttctccacgcataaatcatggtcgatcttccactggttctggatgctgcctgctgttgctttggtagttccgaccgcgttaaagaccactgatggcttgggggacagagacgagatcatgtctccccattttgaggtatcgttttcctcgagtgcttcgagcttatcggcctgcgcattcgggagtcttctggagatggtcttcactttggaaaatgcgtccgatgagagaagggtagccagaatctgagaccctacagctcctgtgcagccgaataccgctgccgtcgccatagtgtgaggtttgtgatatggcactatcttgagagagacacgttccaagataagatgatgtggtccgagcgtttgtatgtccccgcctaggccaatctgacagatgacgtcagcatcactatacacaccattgtagacgcatcttactctatcaatctttctataaaggaattaccaaatctattttgcacactaaaggaagtgcggagatgaagatattattattacacgaaagaccacaacacccaataggacacggtctacaacatactcaatcgggcgccctatgcgggattttccgccaaagtcgcgccctgctacatggcttgatttcagactaaccaagtacataaacaccaaaatgaccaggtaggattcacggattatgaatgaacattgatcgtcttggacatctctccagcccaaaatgaacgaccttaatttccgtgtcgcgaccgaagcggacgcgcctcgactccagcagttggtggaatctgcgttccgcgccgaggacagcagaaaaggctggaccgatgatctaggcctctcggcaagctttcgcctggatgtccaagagatcttggccatgatcaccaagccggacagtgtctttttgatggccaccgacgatgaaaatacgctcgtcggctcaatcgggacttccaaacgcgacataaaccacgctcatctttttatgcttgccgtcgatacaagccaacagcgcggcggcgttgggagacaagtcttggcttacgctgaagactattcccagaggacttggggtgttaccacgctgggattaaatgccctttcgaatcgccagcaacttatctcgtggtattcgcgtcgtggatacaaagaaacgggcgagacatcgccctttcctcgtgagaagttcgcgaacttggcgttaccggatgatctttgttttgttgaatttgagaaggttctggaatagcacctaccggacaagcgcacgtcctaaaccggggctagcaagtccggtggatcgaggataggtgggattgaacggctcagagaagatcgagaaatgtgaactaagtgaactttcgaataagattcagaaatgaactttagcagcaaaatggtcataagataaacctaaaattttaggaattcaaaatatccgtccaagtacatacatagccagcgcttcctagattttattcgccgaggctagtacgaacgtagacaagcttgcatattgtgttaccctaggatcctggccttaaatctccttgcctatcttaagcccgaaatgttttctacatgacttcagacaaaaatacattactagactaggcattctacataccaagccctcaactagaattatttgagcttaaacctaactgcaaacaaggctcaaatgggccatcattccttaagtcatgtcatgagaccaagaccttacttacaatctagcatcaattaatcttgtcgaacactgaggtggatacatggcgaaatagaggatgaacccaggccaaaagcctgctcaacgggatgaccaaccccatagaaaggttcatattgttattactcaaagtcgtcagtccgattatttcctagtttgtagagaattgcatatctgctgaattacatcatcttttgcgtactgtatattgctgtcaaatcttaatatgacgaatgatagaagatcactcgcgtgcagtactgtcacactatcaaggcaacaaacaacaagtcatattgtcgttggctatctcctctttgtttttccgctcgactggacagaagatcaatttcaatttttgcgtacgtttaagtgaattcaacgtcatgtagctacatgtactaatgttgtgtaacccaccctgccaaatgccccattagagtctcaagcctacatttgtttataagttggataactgctctgatatcaaaaggcacgaaaagacacaaggacaactcccacattccaatacaagtctacccatttatcaacattatgaatccaacatcccaatcggctgtgtcatcatgtccaaaaatcctaatgctacatggtaacataccgctagtttctacaaaatatcatatagagctttgaagtatgaatctgactcattcacctcttctcataggctacgcccagtccggacatgtgctccaatgcaagaccagattcctgaagcctcaagtaagagatgctgttctcaacgctctgcagcaagatgcaaattcaaagcccgttgacgtggtcgagtttcactatccttcaggcacgtggcctatgaaactcgatcaaccccgggagagcaatgagctgtggacatggggacatggcgaatctatgactggccgtatccggggccttgaacagtctgtcgatgatatcttccgctatcttgagaagaatggcccattcctcggggtcatggggttctcctcgggtgctgcagcgggtgctataattgcttctcttttggagaaaagacactccatcggcaatttccaatttaatgtaagctgggggaaatatagttggcctggaacatgcccaggtggtagcatggctgactttctttcccttagacggaccacccccctttgaagtttgtggttgcggtttgtgggtttgcattgaaagatcctctttacaacgacttttacagtcccaaaattgagacgccgatattccttgctattgctagcctggacgtaatagtcgatgaatctgaatcgctgagactgcgtgattcaagcacaaatacagctttgtgctttttcgagggggcacattatgtcccacgagacaaggtatttttgaaatccttggtccagtttattgaagatgctttgagcatcaaagaggaccacgaggaggattgggaggattgtggagataattgcggattgcagtaggccatgacgtgcaactggacaactattggaaggcaccactcgggctcaaacaggcaggaaggtactgccaaggcaagagccctgaggaaggaacgataaaaaagtgagtatagatggaaagcttaaggcagatattgtaacccccaaccccgcgttgaaaaactgtgagttacgggctgacggcagggagcctaccctaaaaagttggctctctgatgtctcatacactgagcgaggcgcgtcttatgccaatgaggaaactatccctaggctagctgttgtgaagaacctctggggcccttttgttttctttcctccttttccatgcatgttacaagttgatcacgtgatgccaccagcccattgtttttcgggcgaaaaacgtttgtcttgtttgttttgttctgcctactcagctatgtccacaagattgtgttttttggactattgtcattttagagagttagagagattattgagattattctgccacgtatacactcgccttaccaccgtttttccgtcattctttcctcctaagggatcatttgaagctattcacatttgacccaccacaatccccaccataaccccacccccacgatgtcaaataactagacctccagtttactctttctcacgtattgattcctgtatgtggtcgggtatacatacctctctagatgaagttatgccaagcttcggtacaaccgtggatacgcctccccggaaccaactttttagctttgacgaagtctttcacagccttggaattatagaatcaattgatcttatcatatacagatttaattaaagagtgccataactgaatccacttctgggcttgaaatatttcaagggcagttgagtctgctgcatatggtcaactggctacttagttgccttctccaaatccgcagcccagagagctgcgccaacagtattcgtgaatgaaaatgcgatcgaggcaaatggtaccatttccaaaacaaaggccgcaattccaagtctgatgagcagtcagcattcgaatggatggtaggaagaaagatggagtttacgcacccagtgtatgcgccctggtttttcttcacccattcctctcgcattgtagaatcccaacccttgagctgaaaatacctggcatgaagtatcggtcctgctcttttcccctgcatgaagatatacaacactgttccgaccacaggaatgaggttcaggggcaggtagagcaatgatcgcagcagcgcccgggggttcagccgcgcgagaggccgcgtgaaaatcttacccagtctagccatcgcatctctccctcccgaacggggcttcatctggcgtccttgtgctacaagtggctcctggtcacgcgcgactagggtgccatcgaacgtgtcgatcagggcatcttcgatgagaaatgaacgggagaggacgcttgttatggcggaactttcgccgagaacgagaatcgctgcggaaatagcagcgagcgggccactggtgaaggccatgatggccatctgcggcacgtacgtgaagaagaacatgacggtcgtgacgcctactcccagtgtgatagtccggccagcgcgagagataaaagggcgccagaggtctttgtgggctgcgaagtagacaattccctgagaagatatttattgcaattagagatggtcgggaagcgcccctttaagagctgacaggcatagttacttaccttgaatggatacaagtaggcgccagacgtgatcacgtcatgggcaattgcttgactgctcttgacctcggcaagcactgcatctttgatcttctcggacatctttcctatagaattagtattagtatcggatgagaagaatgagttttgggaatcgtgggagatgacgattagattatcgataagaaaacagccttataatgacgtcattggattgagcttccaaggttgtgcgggacggagtgtactatgacaggtatttataataaatcacatttctacggtgtggcaagcttagttatatatctcagcaagaagtgatctggataggaacatggctgagattagttctcactgaaaggagtccatcctgcagccaccatatcgaccgccctctgagtcgcttcatccaagtcctccttaggtaacctcagtgtatcatttgccaactccattatccctgcaaaatcaccttccttgttggctggcgaaaatacaccaccataaagcatcttagcgaaccccgtgaaaattcccttagacaactcgtcggcgccgtctgcaagacgcttagcgacactctcatgagtaatctcccaatcagagtctgtagtgcccaagacacgatgcagactgtcgagtatatcgcgttgcgacacgcggaagctattgatccggacttccttgttcttgaagtcgacaagcgcaggggttgatcctgactccggtaggctgaggagggcagctagagcgcgaccacattggtcccaagtgctgatactaatgatgcgagtaccctcgtcgaaaaacgtgacctttcggtctttgatcgtgaagccgaaccattgctcgccgcttgccaggctccattcgtaccagaacccgcatgataatgtcactgaggacgagacaccattttgagcatcactgattcgttcaagaacgctctttccatatgcatccccatctttcactccctcagggctaagagggaatccgtacgcatttggcatgatgtaaggaacaccagcctttccggcagctgcggtaatcctagcgtgaagatcctcgggggctcggacgctcagggtaatgacaaggaattgttggccattcaaggcattgacaagcgagtcctcatcgtcgtacttgactcgaacggctcggactccattagggagttttgactggctgtcttcgcgggtgagagctgtgactgtatgctgccctgtttgcagaagcgactgagcaaaggctccgccgatgcggccagtggcctgatgattgtcagcaatttctcctcgaagtgggaccggcaaaatgtagggcataaggcaatagacctactccgacaatggcaactcttgtgatatgtttcttggacatgttgaaagaaattgttagaacaatggtctgaattcttgtctgacaggttgcgtaaacctcgtttatatatatatatatatccatgacctgcacggagttatcggactaaggaaccgccgcctggagatagtcggagaatggacataaggactagtaaagccgagcctgacttggtttgtgctgtccctgatcgtatttcgcttgatatgacgagtgtatacaatgagatccgtaagccaaactacagtccacttactccgtcagcccagcccaaaacctccgaataaaaatagcctgtgtcaaagaaagaatgacaaattgagcttacgcgtaaaaagagtgatatgttgcagcatttatccccagtcaataattaagctgcttcttttatactgccgcaatggccgtgagagttttgcctgatggtaagggcccacactaattgaagaggtaagtctgaatccatgtttaagtcacgttaattcccacttacccatccatagttatcgcaccggcattgctcgtagagagggcaactaaaaacgaaaacatagtcgttagtatcccatagtaagcaatgactgtctctcagaagacacttactgaatcccctccataccgaacaccacatgccacaaagtttcaaacacccacccgacaccgtagtcatcaacaagcggcacactcttttcattcacccagtttagcatacggatataatcacttttgggtcgctgccagatgcgtgctcggctgaccgcaaactgagcacagcagatacccccaatgtgttccggaacttgcgcatcttccccaaatatgtctttatatatagttggaaaatttgcacgcgcatcattcttgtcaatgtctgcttgcgtgggattgttgggattgacatgagtcggacagcctgggttattcgtacagcgcaggttcaaatatcccatcgcatccacggcttcgcggcgcaggctatgcaaaacgctgcttgtgtgggggccaaacagatcgttgtgccactgttcggggttggcatggaggaaaatcgagtactcgggaagctcgtcgtataggtcgacaatgaacgaaagataggccgaggcttcccggccgcgagaagagtgtgcgacgagtagttctgtctcgggctttttgtccatagtgtaaataaacggagtgttatcgatactggccatgggcattcaattagtgtggtcttttataaccttgggacttgtttgcttactgtgtttgaagataatcacgaagccatctcaagtcgtctgagcgtgtctttgacattaccaaagcgacctttgtggtggttgcattgtagctttgggttttcttaaccagttcatgtaacgctgcagtcctttctgcctcttctgattgttctactggcatcagcatagagccacaccgaatttcacagtgcagtcgcgtacttgtgtctagggcttcatccacagtttggactgagcgataagcatccaaatcacagaacttcagaatcaggaggactgtgcagccaaatatcatgagtcctgataatatgggctgatgtctgatccatgagattatcgatctcttgagtcgtgctggatatacacgactctcagacctgctgtgactgaaagtgtcgctcttcattctgaatttgatatgccgtcaagaattaaagtgggagaaagagaaattattttggttctgggtgtgcgacctggcttcagaccgtagttttcgcggccgggtttgcaacatgtgtgaggctatgaccccccttacgtgggaaggttgtgctatctcaatccatcgaacttactcaggaggtggacgtaagcaatgcctagatctctctgctttataaaggtagattcccacagagtatgcaaagagtaagatatgacgacacaaactggttgtgatgatgtaggccatgtatgatgtgccatgtatgaacttgatatcttattggtcgcaatcacttcatacatggctcgcccttgcgtggtaggtggtcccttgcctttgctgtcgatatctcttaccgaacaattcatgtacccagcaaaagattttcgacccatttttgtagatgccgtggtccctcttgaaaaagctaggctcggtacatgtatgttgttgaagaggaatggggcggtatgtgcctgatgttggtaaatgtcgaaacattcgtaatcccatcccatctgatgtgaagttcacgcggagtatgtactaaatatcgctgacactcaaggcaactgtcataaaacaacatccaacggatgtctctgggttacaaactaagcaaacacgctgattatgtgcataactttgctgactttttatctttatgaacgccaagacctggcttatgcaaaaactgggtccaaccaaatcgggcttgattttctatctggtactgttactaacttactccaccgtccgctatgaatacttctatatccaagccggccgtatcgcctacaggcccctctggcacttttatggtcgagttgctgatctacaacgggtcgcctttcaaaaatcactgggcgtactttgttcggtcgcacgaagaccctgatatcggcgtgaagatacacgcgaccggcaatgtgagaagtggcttcgagtttgaaattaagcgcagtgaaaacctgcaaatcaccgacgacattccgtcgacaagggtcccgctgcaatgggtggacgcagattactttgatgagaaggcgatgcttaacgatggagaatacaaaatcgacaatgcacctgtctgtctctttgagaagagtgcttacgaggtcaaagctccaggaaagactctgaactcaatcagtgacggggtgagtgcatccccaacccagcgcctagactgcatgagggtgtcttctctttctctttgagcacacacttacgataatccacacattgctctttttctaattcaccaggattggctgatttggatgtcctagcccaaaccaggtaggaaagttattcaaagggattgccagacatggattgtcgagtctgcggatcaacttcaccgtgacaacattttgagcattgaggttgtcacttatcttcacgcaattaaacagtgatgatgggttccaccagtcgttgagccgggtatcttttcaaagacactcgcctcggtacatgcgaccactttcggttaatgtgagcttgctggcccggctgattactagggaggcggaagcttctacaagaagaatcattgctcttttggaaagtaattcattttcagccaaatcattttacactggagacgaagtggctttcttcagtggcttcgagcagttctagctcagtaatatttttgaattcatagccgcccttacgcaaaaaaagaagcttgaaaccgggcagtattcgttccaaggtgctctcatttcgacgtcaggttcatggtaaatggggtatcatacaggagaacatatcacaggatttaatccccaacaaaaagcaaatcatgaccacaaaatattgagtttcgcaagaccgcgctttggcttcggcatcggctccggatttttgtgccagctttcgatgaaaggccgaattggaatttccgccagcgggatgatcttcgtctttgcccagaatttgtaggcaaaatacacaataacgatgaacggcaggttgaaataagtcgaaacaaaggttgcagtattccaatggccccgcataaatgtcgaaaaccctccagtgaagaacaaaataatgtatatgatcaaggagatccatgttatgtatggctgaaaaggtgctgcccacgggagctccttgaagcgatcgattccctgcttcttgcatccgtagtagaatctaagataaacaatgcagatgcacatcaagttcactagagtagagatcgagacaagattctgcagccatgtgaataccgtactggccgaactggaaagactcatatatccgagtgccatgaaaacgccatagagtgagactgcaacccaagggataccaaatcggttgatacgcttgaagacagcaggggcgtggccctgggtcgccatgccgtataggattctggaaccacccaagatattgctgtttccggaggaccatgctgacgtgagaacaactgcgttgataatcgagggaacgaccttgataccagcatggcgagctgcgataacaaaaggggactgcgaggctgtcccggacgagcccagaagattcggatcggcagatgaaacaaccagaccaaccatgaagattgtcaccacgtagaagagcaaaattcggatgaagatacgtctggcggccataggaatagcttgacgaggatttcgcgtctcggctgcagcgagggtgaagttttcgataccagagtaagcgaagagagcgttgtcgaatgttttccagaatcctaaaaatcggccgagggacccacccactcccaggtactggatgaaggggccatagggggctttccagtaggcaaatccgatggacgtcttatccgggcctcctccacaggtaatcacctgtcaagatggattagcactcaaagtaaacacattcccagcctgaagagcgtaatcaccaaagccatgatgttgatgcctatgatgagcataattttgaggatcgaaaagccaaactcgagctctccgtacacgcgaacaaagacaaacgcggtcgaaagcatgagggcaccaagcacagtaatccatattgcgttattgacagtgatccagaactcgataataacagccgcagcgacaatttccgacggaatcgacacagtgtaggagtatacttggttccatccgttggcgaacgcgagcgcggggtcacagaagacctctgcgtatcgaataacaccgccattgagaggtgctagggctcccatttcaccaacgccgaagacgacactcgcaaccgtagcgccaataattgtgtacgccaagaacgcacccagtggtccagcttccacaatggcacggcccgaactgaggaaaatacccgtccccaccgtgccggcgagggcaatcatctgaatgtgtcgctcatgaagaccctgtctgaactggtgaatctccttgagctggcctgcagcattttctatatcgccagtttctttcatttccccgtcttcgtagtgaggaactttcgggttagacgcaattggggtgttaatgccatggtcgtccttcagaacgtggttcgtcttatagtgtgacattggaaaccccgtggcgtgtcacaaaatctttgcagaagagaagacatcagctaatgaatagcaagttaatagcgctcgtacttttgcacataactaattcttgcaattgcgcacattgtggctccgggcatggtcagttgaaaaataacagctacttggaaaaggccaatttccaatacatatcgtgttgttggctaaggaccgaatttcccctttacaacgcggctttcgcgtaaaatgaaaaaagaaagaagtaaaactcttttcagcggggtttgaatagggcatgtatttactccgtgggtactcatctgctgcccagatgtggagcggagtgggtcacgcgacctgcaatcacgtgcttagtctttctcctgaagaattaaagagaacgtgtgtgggttgttagtgtggcagtcaagttaatgggctagacatgtattttatatctcatttcagcggtctagcatggtcatgtcaagcatcagtgatgcaggaacagcacttggaatattgcggttagggcaccggcaacaagttaattaatctagcttttagtattacatacaacatactgtaaccaggcattaactaacctagcattcaagtggcaaggtggacacaagctatacggaatccataatttcaagtaagcccactctcgagcctccaggccaggagcttgggcgatagatgctactttggtgtccccgtttactttctcttcgtcccatcacagatccacagacccttcgtcttccgatgttagctgctggaagtgtgtttgaaagtgacgacgctttagagcgcccggtcgtaatcgattggttgacccttgatgctgtgtatgtgcctgttgccttgcttcggcgcttgagagaaaatcaaaaagctgctttgacgtaataagaacttcgcggtcgagatccacatggcctggtgtgagctcatccgtcgcgaagtccctgaggaatagtcgtagcgcagttgccgcggttgggaatccagagtccgtccggaaggcctactcgacggtcaacgtccgatcatcggttgtatgtcttttttgttcttttctttttccgcactagagaggagtgtacctgtgcttctataacggtagccgcacgaaactcctccacgccatctaccgttgtatactccggtcgccacatagtaacagttgctctcttagatcctttataatcaatatcgaaggcaagtaccgcattcacactcccattagtgtttaagatatactcatccgccaagtggggaacctgccggcttttttgtgcatagcacacctccacaattacaccgagatagtgtgcttggcggtgcccaaacgaggcatctggttcccgtcttgaataagtctgttcgccattatgtgtatcttcgggtattaaaattcgagatgtggcaagatactcgacttccttagcgaaatcggagagaggtccgttgccctgttggtattgcctcaactgtcttgatatttcgtcggctactcttgcgcaaaacgtatcatggagaggacttggcattcggattgtcaagcagcagcgacaggggtcgtaatcgtatctatgattattccacttgagcacatccggcctttggctcttgatgtcaaaaagctagtagtactaaccttactttatcttccacgtagtttcgaagggattcatctgcatccagcgcacgtaaaacttgtgcatagtcgtcaggtcttagtcgacgttgccaccaggatcctagccggtggcctgcacgatggagtcgtaaacaatccatcacgctttgggcgcttctcgacaatggcttctctgctctaggtggcgacataagaggttcaaaaacactccctggtggactgatgtcagctaccatgagagatacagatactagtatcagaatgtagtttgttatgagatgggttagccacgcgtgggtgtcaaaacatgagcgtgtgacctagcaggcggtgtgtttattaaagatggaagtcacatcgtctcccagtacgctgtcaatatcagtaagcagtaaaagggatgtggaacatgttccaatgacttcctgttgagttcatttatttgacatgaattggatatacaaagatttccgagtgcaactactcaatgaaacctgtgtctaataattaaccgaaatatgaccaagtagatcgttcaacctgagtctcctcatttcaaactgatggcatcaagaccatcatattgaatgccaaagccctcgagcagattggtggcagcagtttcacccgacttataggcaccatgcacgcagccattgccaacaatagtacaatgctcaccagcgaactgcaagcgactggatttgtggtttttcaacgcatcaaccagcagctgcggctcatctccaaccttgtcggcggagtaagtcccatacccagccagtgggtcctgggtccaatgtgtagtttcaacattaaccaggctaggcaaagccttgtatggttctgtgcggaatatcttgaaaagcggttcaaaaaatagatatatctccttcggatcttgcatgttctcgatgcgctgcgtcagaggttcggcaatctgtacgcacagctctttgctgcccgtcataatccataaattgattgtcacggtggcgtaatttaggatattatcattctccccgatcgagtttatactggggttggactccatggatgatgatgacccggttgaagtgtccgtttcctctgatggagatgggtagaagacaaactgatcattctcctttgaccagaagacttcggcgaattcgaaaaacaccttgcccaaggcgccgtagctgcacctagacatgccctcttggatgtcacccggtaagggcgggttaaacgagatgaggttgtggtggtagacccccagtgggctagtcatgataactgcatcgccctggatgaacccgacttctccagcagcatccttgtaccggattcgagctggtgccgtcccgtgttcgttccactccacgtcctcgacgcggtggttgagtctaatgatgtttggatcgcttcggagcgtctccgcagtccagttcacgatccgatcatagccacccttcatatatacattgcgttcggtgatgaagtaagaaagatgtttggacgatgcttggtccgtactagtgccgatccacaattctacctcgcggatagcctgcggagcccactcacgctcatcttcggtgatgagctggtgctggagaacgaattctctcgcaaattcctggactggacgatcctcagcctctgggttagtttcgtagaaccactcgcaataatcagcgaactcgtctgcaactttcttagctttgaactgggatccagttcggccgtctctggtgaagtatagaggaacgccatcgtcataataatatgggatagatagctggggaatgagtttcaccaggctgttctgggaagtttcatgcatccaagcggcacctattgactatcagcacagtccccccctgtttcaacctcgatttcgggtttgtgtcattatcttaccaatatctcggacatggtcaccctttcggcttgtcaaaattcttccaccaatgcgatcgcgtgcttctaataccaccacttcgcagccatggcggtgcagaacagccgcggcatgcaggccagaaactccagcgcccaccacaatcaccttcttgcgctccgacctcactgcgtgtgttccctcgatcaactccctcggagtcttatcgagcgcagccaggtcggagcaacaattactcggttttatgggattaatgcccgttatgggagaagaaagatggaaagattgagccatgctgagctgacaagttgacattcgatgaagttattgagtaagtaaggatcatgttgaaacgaagttgaggggcgttgggctgtgctatcgtggtggatagcgaccactggagactgtagtattattggcttttattgcccgcagaaaattggctatctaccagacttcaggttccacggttattatcgcgtgcataaaaatcagtggaataaactcttctggttacatggatggttctaaactgtatacggaaagttttatagtttgtaggtctaatcagacatttatagacatctctaatgacatctgaaagaatattgagcagcactaaaaagatcacgtagtagaatcgtaatgataacgattgttcaagtccgtatcaccaagtatgaaggctgtataagcaagcatttcgtttctatattaatgactgcagttgatctatcgaagcaattgtcttcctagtacccgtcatgtgcaataaacgtcttagctcattggtgtctcattttttgataagatccattcctctcaatttaatattgaatcacccaaagttgaccttgtataatttagatgatattttccctttagctagttcgagggtgaaagaaatccgaaggatcatgcccaagtaagtaccttttgtatgggcacaccatacaaagaatacttaaacttttgcagctgaaaatcatgaacccgccccatccgcaggtgnnnnnnnnnnnnnnnnnnnnnnnnnnnnnnnnnnnnnnnnnnnnnnnnnnnnnnnnnnnnnnnnnnnnnnnnnnnnnnnnnnnnnnnnnnnnnnnnnnnnnnnnnnnnnnnnnnnnnnnnnnnnnnnnnnnnnnnnnnnnnnnnnnnnnnnnnnnnnnnnnnnnnnnnnnnnnnatccgcaggtggggctgggagagacagttcagattctacggagaaggcggagatctgagcggtgacctaaaagcccctggtggtcgctatatacactgaaatgagctatgaggggaaacaaacctgcaggtgccgggtgaattggggcaattgttcttcggtattcatcttcttccaaaaatgattttctcgtgatcttcccaaatctggccggacccgcatcttatccgcatgtacccgcattcgacctgcaaaggagtggcgggaactgcccacgtgagttccaatcagatcggctatgcagatagcgacctcgggaggtaaagtctgtgaatgggttcaaccatttacgttgccgtggagaatgcggcttttccgcacggatcccggattagggttttggagattgggagaagtagggttcgttgaaaattaaactgtcaatacggaagaagagagaaaggtgctccgtaaacaacattccaatgtggagaggggcgcgtgactcaaggctgacttcccaactgccttcctaattagtcacgtaaccccgagcacttgcttacacgaactggccaggtgattctacattattacacaagagtcttacatatcagacctttgagaatcatgatcacttgtactttttaccagcaagttgaacattaacaaaaaaagcttaacaagcgatgcgtaccactccattgaacatgatttgaatgtgagacctgtacggagtactccgtagccgcgatatatatagacccatataaagcagacgtaatatagcaacatatcgtaagcgatattttgaaaaagccatatgtatatcaccgtgctacttatacataaaaccaataggtcagttgccttactattactccaatgttgtcctagggtttcatttagaaaagactagagacaatgaatgatacgttagaaaagcaaattagataccaagtgatctctatacaggaactttagagctcttcttttgtctagaacacgtatataggagaaagttcagaaaataaaaaccaatctaagttgacaagttggcattcaagcttgaagttttgatcacacgaccagaagttgagagatctggggctgcaataagccatttagggtatgaaaatacacggcagctttctaaaatggccttgttatctcctcggtcctaccttccaaagaacataacatatgtatataaaccaaacaacaaaacgaagaggactacatcgaattctatagggccctgaaatgcttggcccatgcttatctcgggcaggagccccacacgcaaatcgaaaattcttgctctcacaattttcccttttctttcttcttcccccatcatagaggctgatacgctctatttttcctctcgataacatgtctccagcatgaatcactcgccaggtcgggttttaatcagattccgattttaaattcagaaatggaagaggacctgcagctcaatggcaccgagcgcatctgcgttggcggggagatcacattaatcccctcgcccaccaactctccaaatgacccactcaattggagcatctggagacggtactggcattcatttctggtccttgtgtttgttgccctgaccgcggcaaccgccaacgatgccggcaacgctgggaacgggatgaacgccgatctaggtatcacgtgggaccagatcaacatcgccgcaggcgtcttgtttgttggcattggatacacaacgttgctcctcggcccagcacctttcctgtatggaagacgtatctcctatctgatttgtctggtgttttccatcattggctccatcgggctagcctgcacacaaaatgtcggggacaacatctggagccaacttttcgtgggcgcctccgaatcctgcgcggaggcccttgcccagctgtctctttcagatctgttcttccagcatcaaagaggcctggtcctgggattgtacgttcttgccacgagtatcggtacattcacgggacccattgtgtccagcttcatcaccgactcttacctggggtggagatgggtgggttggtttgctgccatcatatccgggggcttgatcgttatcttttacttcacattggaggaaacattctttgatcggaacaaccctattcgcgggcatgatgcgccttctgtcaacgctgagtccacgtcgaatgacctccccctggagaaaaaggataaaccaactgccagcgtacaacgggcgccctccgacggcgaacttgacgaagaatgcggccaggagaaaggaaagacgtatttccagcgcattgccctgatcacgccatcgccaaccctggtcgggaccggcttcaagcagtattgccgtcgcctgttgcacacactgcgcgtcttcaccttcccggcagtcctctattcgggtcttcaatggggtgcccaagatgcctggctgaccttctacctcaccgtggaagcggacaattggtacgaggcaccctggaactacagcgacgctgcagtgggcatcatgaacgtgccgaccctgatcgggtcagttctcggctgcatttacggtggatggttctccgacttcttcgtcatgtggatggccaagcgaaacaagggcgtctttgaggctgagcagcgtctctggctcctgttgcctgttgcgtttatcggtcctgctggcctcatgctattcggcatcggttcggataaaggctgggactggcatctgccgtatctgggactaggattcattggtttcggatggggttgtgcaggcgacctgagcatggcgtatctcatggatgcgtacccagatatggtgttggagggcatggtcggtgtctctgtcattaacaacactattggttgtattttcacattcactgcccagaattggttggatgcgcagagtcttgcgcaggttttcattgcgattggcgtcttgagcttctgctttattatgacgactgtcccgatgatctactggggcaagaagtgccggaggattactcggaagcagtacgaggctttcctgctggttcgtgatggaccttcttagttgagggtatatctagctcgccattgtcattcttcgttcattttgtcaatacatcagcatattgtaataatctgtgtgttttgcggacccccacctacgctgacagaatttgccattcctggtacctacactagctggcggttcttgttttacgcttgtgggtctgcagtggcgtttggcagtagcagagtgagggaaaagaacaggagagtccttttcatttaggacatcgttgtcaatcgtatgaggaccaaccatcttggtggccaaatctttgataggccatgtctgccaatcatttgagataaaactcagacatggcgcaatttgggcatttctagttccccacagaggaaaataaccatcaggcactcacaattgtctgaatagtagtatggtgcttcacatcaagtcaatgtgcgtaggccgttcgtcttcgatttggtcgggacgcaatccacatgacgtgtcaacaacatatatccgatttcacgcaataaataatgcagcacagaaagaatatcgactgaaaccccaagatgctagagtcggggaaaatattctcgggcgtacgtagtcctcccgctagctcctaactatctggggccaactacgcaagctgccccgtcatctcccatccaagctttctccggtggatcgccaattaattgcacggccacaacgaatacatgccgatattctacaacatatacatctcatatcgcccgagcctgctccactatggttcctgtgcacggagccaatcgctatcctccgatgtggtggctggatgtatttgcgtcgtggtcgatgcgatgttccaaggttggacctattgacgcacatctaagaataaaaatagcggacccaagttcatatatatcttgctctcgcttgttcctgagactaaatcctaaatcccactgtttataattcctggggattcgtctgttttctcaatccttgtcgatcgttctgtgcattattacttcagtcgttcgctctatcgctctacagacttcaatatgggcttcccgtcttactgcaagtgggctgctctcgccttggctgcgactgcggctgcgcagactactaccagctgcgaccctatgaatagtatggactgtctcatgtacttcgctgcggacccgcgctgacagtttggtttcagagacttgcccagcagacaccggtctgaacaagtaccgtctcaacaccgacttcaccgctggatctctaggtcgctggaacaccaccgccggcaccgtaaccaccaccgacctaggcgccaagttcaccatcaacgaacagggtgacgcgccgacaatcgaaagcgagttctacatcttcttcggccatgtcgacgtcaagatgagaaccgcgaacggcaccggtattgtcagcacctggatcctcgagtccgacgatctcgacgagatcgactgggtgagttcaccggcatcagacgccaccaagcctccaatcccctcaaatagcaaccactaacgcaatacgcaggaacaaatcagtacctgggacactgaagccgaaaccgactacttcggaaaaggcaacacaacctcctacgaccgcggcacaaccgtaacagtctcaaccccagaagaaacattccacacctactcagtcgactggaccgccgagcgcatcgagtggctcctggacggcgtcgtcgtgcgcacactcgagtacgccgatgccgtcgacggcacaaactacccccaaacgcccatgcgcatccgcatcggcatctgggccggcggcgacccagataactccgagggtacgatcgagtgggccggcggcgagactgactacaccgaaggtccgttctcgttctacgttgagtcggtcaatatcatcaactacaccccggcttccgcgtacaggtacaccgataagacgggcgactacaccagcatcaaagcgacgaacgctactatctctaccaacttgggctcgtcgaactccagctccagtgtcgcttccagtaggacttcgtcttcggctaaggctagctcgtcgttgattgcttcttcgtcggcgtcggcttctgcggcggcttcttccatgagttatgtctctgctgccccggcttactatagttctatctttgccatggctgtgggatcgttcgttgctggcttgatgcagttttagatgggtgtgttgaacatttaataggtctcggtggtttggtgatgagacccggtctattgatatacgcattattgttgccttccagtcattccttttgtgaattgtcggccacttatgcggcctggcatgtcttttttcgaagtctttttagatgctttcttgaatattctttagatatcttctcccagaagcataattcgcaatatctacaacatacgcaactaaaagtcatgaaatgtgcaaaatgattttccatatataacatgtgattgctctgactgatattggtacatgctatccttctttccttctgcgttgaatccgtacatacactacatatatatatgaagctacaatggaatcaaactgttttcttctgagttaaggcatatgaaatgaaaagacagagacaagaattagagggggcagagtcggaagacgggatggcgcaggggtagccgcgtcaatgttgacgacacaccgacccagccaaccttagaaatcaattttcccagccttaaatcttttcactagcgcaacaaatgaggcctctactaagaggatgcttcaacgctcgcttatgggcaagaataatcagaatccagccggggataaatcccgccgatcgcattcctggcagagcctcaccgacgacagccttctaattgagaccatcatcaacattggaccaccaccaaagagaaacccggatcctttccagtgcatggagtcccgattatcgaagcagactagccagccgaagaaaaactcaagtatgttcgaagctaggctggggcagttgtccaagtacatggttggcatggaaccttaggtttgtcaagaacaaacaatttcttcttattcaagtagataatagcttataaccacagagacaacaattatgtcgcattgaaaacctatatccacaagttagtatttcaccgtgagcgctgcacacctggacgtgggataataaccgaccagtgtgtacaaccttgcattcggtatgcaggaaatccaagcctggagtaattccttcaggatatatttggccatctcctctgggactctgttctcggcattctttctctgagatcgaagagactgatacacgcgggttcttgaaacagtacgatatatgtctgccagatggaccagcgactgtgaaagaatcaaaggattgccgaatattctctctccctggatgaacacttgacatgtggggagcaatttgctggtaaaatgggggcactcgtttatttccttgccctgtatagatgttgatttcggtaatttattagtatgcgacgacgacagcgagaacgccaagttcaagggtatcgaagactccgagatgacctccccatccgcatgactgaaccatttgtctctagctatcctttcgaaggagggaccgctgcggctttgtggtttcggtgaggctaggatcgggcctgggccgtatgattatcttgccatgccatgcctatgccatattgcacgccggagatgatgctcgaggtgccgtgagctatccggtcgatattggtgtgttgggcttgcagtgcgtttggcccgtattccgcttctcgtggcttcttcttaacacaagtcctgattgtttcaatataggcatgtgatctccttggtctgaagaggcttttcggtgctaatcacactgccgaagatttgtatgaagcagcccatcttgcagggtcgattgttgtgctgggtctgccgcctgctgcatttctggcgcttagtcctgaggtggtggctcacttctaggatgaagatggtacgtgtgagattgcttgatagatttggtatctgacaagacttgttgctgatttgattatctaggaaaatggtagaacattgtctccccattcctgggatgggctcgcttgaatcgttgggcggtcagatggaactatctatttgcctctttcctttgttctttccttcccaaggttctttcctttttggggttgtttaccactttggctaagcgagacgttcgacttttgcagtgtttgcagtagggccaggtatatgaacaggctgattcccacttctgcacttactttttgtctctctcttcatcctttttaatcaactcaaccacatcgcagcgcaatccatccaacatgcctgccacctgtcgtgtccatcatccatcacatgacttgtctgctcttactatatcttttttccataacttacatttatccttcggacatcctatccacatcacaagcatccattcatggcacctgtcattttcatcatccatcaaataactcagccacgtcagaagcatccttcaacttgcctggcatctatcgtacccatcatccatcagtgacttgtatgttcttgctgtctcttttcttcatatacttacattcattcttcaggtaaccaccatatcacaagcatccattcatggcatctgtcatgttcatcattcttcagacaacccaactacattctctttccaccttctactttatgaggtttgtttcttgtctatattgtcacctattcttcatcttcgctcgtcgtattacccagtgacatggggctgactgtactagacatgcgctcaactacatccagccttaccgtgataggttccggcttcaagacaatcggcatgcttataacaacagcaaacacaaaagcaaaaacacacaaaagcaaaaacaaaaaaaacaaaaaaaaaacaaaaaaagaaaacacctcgaacgatttcaatcaaccactcccagtatcacttcaaacaacattcaaacaatcatccacttcaagcatcaatcaaccacattcaaacagccacttccagtatcacttcaaataacattcaaacaatcatccacttcaagcatcaatcaaccacattcaaacagccacttccagtatcaacttcatacaatcatacctttcaagcatcaacttcaatcaaccttcaaccaaccatccactgcaatccactatcgacattcgactactacaatgcttcgaccttaaaagaggaggaatgaaaagaaacggtcttgaacgaagaagtctccgcaggagtgtctctgaaggagacttctcgtcgggaagaggttacagcgtgtacccatttaaaggagactctcaagaccgtttgctgtggtggtgtaaaaaaaaagctcgcctcgacaagcatctatatacaagctctatctcaatcatccacttcaatcatccaccaatcaactacttccacccgcatttgtgaaggtcatgcgcaggacttttgacatggatgccaatcggagagtgactgctaaagatcttctggagaatccttgattgaaagactgatgtcctatgtataatattgagactgcttgatagaaacatctctgttcaaaacatgtctaccagtgcttttgatatattatcattgaattaggattcaaagtgggcagagtacgtagcgaattaagaccaagacaacattcacccacggtttctatgccattgtccgtcgaattacagcaaaaaagaagattcttccaaataccacaaattatcaaagacaaaaaaaaagtagtgcatcatccgtgaatcgaacacgggcctcgtcgatggcaacgacgaattctaccactagaccaatgatgctagttcatgtgtggggactcggaagttgactatatgagggaaatgcttcttttgtgcgatgtcggactccacccatgttgctgagggcgttgatctcaattgggacataatgtaatagggtgatactaagatgaatgctagaagttgcttgtcttgtatatttcatatccaatgaattattcttagtggttatgttggttacattattactgctgagacatattatatcctacattgtatatctcagagatggatttcaagtatatgacaatgacaatattcacgtctgcaagacaataaatagttatgcacacaaaaaggtagctggtcattaagacattaatatatgaacagacacttcaatgtgcaaaaaggcagactccaagcatagaaggtaaaaagatgaagaagatgcaacaaaaatgcaacggagatgcaagaaatggtatatagagaaatcattgttcatcagtgttccgggtaagagggttgacgatactaggtaacgctggaggaaaaggatattgatcgtcgaagtggtccagctcacttccgtcgccactgtacccaatgctatcgcggttgtcatcaatgatgcgtccgtactcaaggagaaggagatagagatagatgtcaagatccgcgttgcgcagcgcgtgctgcgcccattcctgactttgagatgcgattacctcggcctcaaagtcatgcttctggatgtacggttcgccaactgagaatgcatcgacgggggatacttctgggtcgagaccgaggaagtaggtcattaatccgtacaggtcatcgtagcgattgtccatggggacgaagtgacgccaggggaagagtcgggagtcatgccattctcggaaaatagttgctttgatgcccagcgacttgctgagctgaaatgcgcgccagcgaccggaaaagctgtggccgtcaatgtcgacgaggtattttgccttgaactgctcgctgaagtccttgggctttttgtaggtccaaacatcgtcgtagaaggagcagttcgggatgcagccccaagcctcagtgaagccgacatcgaagtggtccagtgaaaatttgcttggggagaagttgggataggtatgataccggcccgggctggtctcagagaggatggagaccgtctctgacctcatatcagtactgttggtaatgtgcacaaagcgttggcgatgcatatgctgccaattatccgcaagttgaacacccccggaggtgacgccgcgccagaggagagtgtccgctttgtctttccacttgtaatcgtgtcgcgaattgtacacgtaccgcttgtcgttcatgaaatacatattcgcgggaaaaaggatgtcgttgttcacgctaaccttgcactcgctgaagaccgggatcagtttccttgtgatgatattgctggatgctgagaacaaaaacccgtggttctccccgagaacggaaccgacagtgcatagatcagaggatgcagtaaagttggtgataaacccacccaagggcgatttgtatagcttatcggcatcctccacagtgagattggcattccgagcaggggagtcagggtcacaggactctttggcgaagtccatataaagctttccagcgatggagaaccaagacgggtcaacacgatcctcgatggtggaatctttattatacaggtgtttcatgcctggagtgaattgatcctgcgcatcgctgggtaagtttctggtgagggcctcggtacggaggtattcctgggtatcctcgaatgtaaccatgactcgcggttgatccaaaatattaagcgcaatatccatgtccggcagataccgagcaatgcgtttaatcgactttctcagtgtttcaactctccacccttcaatgggggagtaaacaaccttcttattgcgaatctgcacacctgcaatcccgtcgctgaattgtagcttggctgccatctgtcgaatttccgctggaggtaccgcccaaaaaggtcgcagatcgcccgtaatctgttcgaagtcgtccacgttatgcgaattctttttgcgtgcgaacatgtaccattccttgaaaccgggaggtgggtgtcgtccatatgtctcgcggtatttggcgacggttcggcggaaacttgtcgagcgaccatggtcatattccagccatttccggtccgcttctttcatcaggtcggcaatagggtgttcatcgtgcgcatactctccgaacacggggttcgttgttgcggtgaagagccccagattagggaggcggattacggagctgtcgaccgcatgggtgaggaacagaaggttgatgaagcatatggaggttgctgcgcaggccagtagcaagtagaatgccctgcggttccgagggaacgggcggagcattgagaattggttcccaaggtcgggagctacccaggtaggttctagccgcacaccaaatctcgacaatcttacagggattattgaaaagaaatcatgaaggctatgaaaagggggtgaagaaggacataattgtagcaaacatctaggagttgagcagaggaaaggaaaaaaaaagagagccgcctaaggccccttagcctcccacgtctgtcttagggcgccaagggttttacaggcatcatactaataaagttcttggctggtctttccaaggtttgatttaaattacatttggtgtttcacctaagcgaactataagcgacctataagcagcctatcagaacaacatgataatatctatcggcaaccttgtgtagaatatgtagatcaccttgctggaacgtggccgagcaatccgtggacgtgcccgatcaggaacccctcggcggggatgaccgagcagaggccgagtccaatttgactcggatacggtcggctcttggtatatgtgaatattggaggatactcatatatcgcatattttagaactgatatattcacaatcaatcaatgttttaaagatcatttcacgactgatcaaacatgcaaattagactaataaacattagggttattgcccacgggttcttcatggcccggcggtgagacattcctgactcggctcttacataagccagatccttcgaaggcctcaggcacaaacccgcagctcagagctgtcaatgcgactcccacatcttcattacttctttcgacgcgcataatctcttccatgcagatgacgtgaccaattactcctcatgggtgactgtcccattcgaaaatcatggctctaaaacgtactcgcgccgcgctcgaggccgatcttcaagcagagcaatcaccatacgccttctatggaactccgttaccaccactcgacgagggagttcgcgatgatgggtcctttgtgccaatatggaagcaggaactgcgggacgaaaacgggagcaagcgtcttcatggcgctttcaccggtggattcagcgcggggtgaatagccgcctctaaacaaacgacccttggaaggacaaccactgacgtctgttagatacttcaactccgtcggctcaaaagaaggatggactcctgcgacctttgtctcatcgcgccagaaccgtgcccagaaggccgaacagaaacgacccgaagatttcatggacgcggatgacctgcgagaacaggaagaatccagacaactacagacctccgatgaattcgccggctttggtacaacggagctagatgctacacgcagagcgggactcatggatatattgaaaaccagcggagaaactatgggagtgaagctcttgaaaaagatgggttggcgcgaaggtcaaggtatcggacctaaggtgcggcgcaaggccaatctggacgaaagctctgctccgggtggtgatgcggaggaaacatacctttttgctcctgagaacccacccatggttgccttcattcgcaagaccgaccgcaaaggtcttgggtttgaaggcgaatcgcgcctagagtctcacaatgctttgccatccataccagatgctgaggaatccgattcgttctttggggggcgattggctatccaagggaaagctcagcccccaaagccgaaggaatcacggcggggaggacttggagttggccctctcaatgacaccgggtcggacgacgaagatccttattctctgggtccacagatctcatataacaagactattggaggggataagaaaaagaagaaaaaggccaaaccagaaccaacaatcgcgtcatccaacccactcctaaattcaaagcccgtgttcatatcgaagaaggtggcagcatcacgcggaattggcggtttcagaaagtgccgcgacgggcgcctaccgctggatggattcattcttgccgatggcatctcgggaatgtcgatttcagagaagaaatacgatcctcctgtgatacccgagggctggaaaccagccaaggagatatggtcagaaaaacgagataaatcaaagtatgtctctacagctgacgccgcaaaagcttcgtcgcttaatcccacgtccagagcagcacttctgggcgaggatcaactgcctgggaagtctatatttgattatatgacccccgaagcacgggagaagattgccaaacttaccggcaacgccaatttacctccagctttaggagaaaaggcacccaaaggatacgaactccccgaatcaaagaagcgcaaggatctttgggacctcgtaccaaaactcgacaaacagactgccgcccaggccctagctcgggccggtggtgggtggctgccttaccaagaagatgagaaaaagcgtgcacgctaccaaatatttctcgaagttagtgccgggactcgctctaccctcccagaacgggcggaaggatctagcaccgatgactgggttatagagatgcaagaattttgccgagctgcagaagtcttcaaacccatatctggggttatggcatcacgatttacctcctcgtccaccgcgcccaaggttgtctcggatgctcccgactctacagaatctggactcagtagacccgctgaaaagccggacgatcctgcagtagcagctgccaaagttggcatgttcggcccaatgacccgaagcacaatccccttttacccatctcgtcttctatgcaagcgatttaacgtcaaaccaccggagaatgtgcaacttgaccctgaacggcctggagcctccagttccggacctggcacgcgctcccagtccgctggtttccaagccgaaactggcccaaaacaattggtatcgcaggacattatgaaccaactcctcatagactcgttgggttaccttccaacagcagatggtcttgatccatctggtcagcctgttagcgcggcgccaccaccggtagttattgaacctgagcgcaatgatgccctggaggcagagcggcccggcgatgctgtctttaaagctatctttgggagtgatgacgaagatgactagaattggttctatttgtaaatgcaatgagaattcatgtattttgttttcagttaaagtcctataccttgtacgaattaagcaattgtgctctgtaaatcattcaatgttgtggtggtgtgactattggagtcgtccccgcggcattaaatgcgcgaatgggcgaaattgtggaatgtagccttgtttctctttgtttctgtttcattttctgtttcatttctatttcttttcctttaacggttgcctccttttccttgacgcctttgcctcgtctccagggctccaacctagtcggtctgtgctcagcctttagatctagttcgccttagagcgttgaccactactccacgccaacccctctccaactatttcccctcctcatatggagctccttgagtacgagtaagatggtaagaatccaaccccgaccatgaaccccagaaattatacctatgcctatattatcatcaataagactggcttggcgtcgaacgtcacacgaccgaaagccccggccgtcatctccataccatgccaacccgcaatggccccataaccataactaacaaaccccacagggctgctgcgcgtcagtactgtcgcataatgtcgacaaccaaacctcccacacccaagaacgcatctcacatacaacagccacgagggataccagtgaccgcaccacgcaaccaaggcaacgcacgcggcacaccgccagcctccctctaaacgagcactataatgagccagtgcgtaaccatgtgtggtacagtaagcgacggacatggacgcgtgcgcagctggaccgcgagcgcaccgagttcttcgagacgcgcgttaccggcaggccggagatatgggccgctgtttccacggtgatatcgctgattcgcaacggtgacttggctactgcgcagggtattttagatgcggcgggcattactgttcccaccggggatctttgtgagggctgctacgatgagcaaggcgtgctttacagggttccacaatgtgttgttagtgatccggagaacatcgttccttcgtcttcgaggacggctagtgaggatggcggccctgctaggtatgaggaggagcaggatgctgggatgctctcagatagtaagctcgctgatgatgatgatgcggatgcttccggggacgagttaatttcgcaagatgttgaacgccgccgtgaggagaaggggaagacgagtgaacgggatttgatccgtgtgcttgctcgattgagtgatcgtggaggtccggatatactgctttccattggtaagggtcagactgtgggatttttggcgaggagagtgcatcaggaagccaaggttggtttttgttactgatctgttcatttcgttctctggattattgctaatttgttctttagctcgaggatgataggcgcgttcgaatcgcttacctaggtcacttgctgaatgagcgtgaaccgctcgttgaccaagggtggaagactggccatgttgtcaatgctctcatttcccctgttaatgatctaaaccttggacaccgatcttaagagacccttttgacgcatcgtcgatgacccaccactaccgccaacatcactctttttctcgtcctctctatttgaacctccagcgttctggcgtttctgtcatcggatctcttttcgcataataccccaatcttttttttacgttttgccatctacaacctggcatactctcattaccttagcatgatatctcatgtggtgatacccatactcgagtgaaagcagactggctctcaagatatcatcgcccccagctgtcgaattttgcgccccttaattacttgatctaacatctaatgtctccacactttccaagatttttgtgtcatattctcatgtaagtttggttacctatgtacatagagatccacaccaacgatgagcccgcatttcaacctagctcttccatatttgacctatcaccgcaagttctcagagttgttttagcgactccacgcgatcgacacatgcagggcatcacgtgccatgacgtacgtggagtacatgtctatcataactcctttggcgtacacctggtagctctttcaccccgcgtgttaatatcccacattttgttaggctttgggctttggggtaatgttcaacccatacagccaaaccatggactacgaggcagaccgtcagaaacgggaggtatatcgatatttccaaccggaaaatccagcggcgcttaatgcatcacttttccaatttgatgagcatctggctgcaataggagatttttcaagagtcacaaccccttttgtacccgatgcctctgcctcagagagaagttttgtcgaaggcagctctccgtcaagcccaaatacaactttgacttcttttgcacaactggccgctctacgcctgaacgcgcagcgtgcttttattacgtacattactctcctgctctagcgtggattctgatctgaccctttgcaaagtgtattgaacagcgactctcagtttatattggctgaagccacaagaaacaccaatcttaaaagctcaaggtcatccgttggggaaggggataggctcttcgctgggacatcgacattgtcagattattggaacatatgccaggtaggtcgatatctgaaatactgcgatattttacatactgacgtctactccttcaaataggagaccgttgcgattgactcagacaacaaagatggatcgtattcatttttaatcgtcaacgatcttcagcgggaagaacgattcagaggattgccttttgtgacacaagagccacactctcggttttatgccggaactcccctaactagtgatagcggtatcaacctgggctgtctgtttgtgctggattctgaaccccgtcaagggctatccgatatcgagaaggatacattaggaaaagtggcggagttggtaatggactatttattagttagtcgtcaagccgcagaagggcgacgggcctcacggctatcgcgtggtctccatcttttcgtcgatggcaactccagttttgccagcaacgctcacatgtcgtctcgatcaaacagctcagcacatagttcgtctccgcaggcatcacctcacctcagaacccgccaacctataagcccccaaaatgatgaattggaattttgctcagcacagtctggaccaggaaatgcgtctcgaaacggcgatgcacatcctatgagctcggattctaaccataatgaaatgtgtgctccccccagtccaacggaatcgttgcacagctcgcaacaggacgacagtagttcagaggattcctcgagcagcaaccactggcttttccaacgtgctgcgaacctcttgcgacaaagtctggacttggacggtgctggcggtgtcatgttcttggaggctagtgacaactcctctgaatatgtcgcagctggtcatagtgactctgctggatccacagatcctgctcctattcttgcgctgtccaccagaggtgatccgttttcataccaagcaagctctacgctgtcggatccagctgtcaatcttgacaacagattccttaaacagttgacgcgtcgctatcctaaaggaaaactctggtcatttcaccgcgatgggacgttctcaacgtcggaagatcagtcaacagacgattccagaaagcaaaggaagaagaccaaggcttcagagaccagcaaacttaatgagttcttccctgctgcatctcaaatcatgtttgtcccactgtggaatgccacagattcccagtggttcgctgggtgcttttgttggactccccggccaacgcgggttttcagtcctgctgttgatttgagttcagtgtttgccttcggctcttctattatgaccgaatacagccgtgttgaatcggtcatcgcggaccgccaaaaaggggattttataagcagcatatcccacgaattgcgcagcccgttgcatggtgttttagctgcagctgagtttttcgggagtactaccttggaccagttccaagaaaccctccttgatacgataaatgcatgtggtcgaactctcttggatacaatgaaccaagttttagacttcagcaaaatcatgtcattagaaagacacaaaaaaaccttcaggcgtggaaaagatccatggaaaccaaaatcatctgaagacactgtgccgcgcctagatacattggttttgacagatgtggctctcttgacggaagatgtcatagacagcgtgtgcttgggtcattcccatatacagaagtcagccatatccaccaatcgtgccacagatatcttgtcaacactgccttccaaatcaacatcaaataccaacaaagttggtcatatctcaggagtagacgtcgttgttgacattcctgataatgactggatgtacaaagtccagccgggatcgctgagacgcttaattatgaatatccttggcaatgcactaaagtataccgaaaagggtcggatctctgtttgcatcgaggccactgagcgctcaaaaggtcgctctcgacgccaaggtctcgaagatatggtgacattgactgtctcagacacgggtaagggaatctcgaagcaatatcttcagaagaacttatttattccattctcacaagaggatccgctgtcagtaggcactggtctcggcctatcaattgttcgcggcattgtgaagactcttaacggaaaaataaatattcggagccgacagggcgaaggcactattgtcaaagtgtcgcttcctcttgaacgtctagtgggggaggaaagcccacaatcaacgtcagaaagagaaaattcggaccaaaatatactcacggcatcttctcaaccccgacgtgccagctgtaatgggaaacgagctgctatctggggaatcgacctgtctcatcttggcgagaatcagttctgggcttccatggctcggtatatcacggattggtatggtctaaggcttgttcctctgtctaccaatgagcctatagatattctgtttgcggatgaaagggatttgtctacaaaagaaatacacaatttcccaccagaattgccaagtctactcgtcttttgcagtgagactagcgattatggtgagtctagggcacaatggtcgcatcttgctggcactctggcaatcctacatcggccttgcggtccacggaaactttcccgtggtatcttgagctgtcttaatacaaatccgacagcccctacgttgaaaccgcagaatcccaggcaaggcttagtatttccagagcgacccaatcctacaggctcggctttgccaattagacagtccaatccctcattaccacgaaatctacgatcaccagatgctgaaccaccaattcccatggcggcatcgggcaattgcatcattggtcttacagggcgtagcgcttttgtatcgacatcgcgtaccgacagctctggccgcacaacatccgggagtactgattccaccaatcctgggtctttatctactcggtcttcatctgatggctctgatcatgtcactcccttgattgggagccaaagcaggcctcgggtcttggtagtagatgacaacaacatcaaccttcatcttatgatgactctcatgaacaaacgaaaagtcatggtcctagataaagccgaaaatggcagagcggccgtggatgcagtcgaaaggatgttgcagggatatgaccttattttcatggacatgtctatgccagttatgaacggatttgaggcaacgcgcgccattcgtgcaattgagaaagaacggagtgactgtatgccagccacaataatcgctttgaccggactcagcagtacacgcgatgagttcagggccctggactcaggagttgatcttttccttgtgaagcctgtttcttttagggagttatccaggcttattgatgaatgggaggccaaactgccgaaataaaatatggcgatctctatcttacttgatgcaggcttgccacccagacgtggaaggtcactttgagaattatcgtttcttacattggcgtttttggtttctttcttcatacccttgctgctatttgggctgcacatatcatggatgatgattgatgaatgatggcagtattcgatttcattatctaatttctgtctatttcgtcccatacagcttcaggggtaattatatctacagacaacacttaatggcggtaaattggacgccgaaaatgacactattgatgccattttcagcatcccttttactagaacagttgatcatcaagatcctgttattcggactggcttataccagcttatagggtgctggacactgggcgactaggacggataggcagttctagagagattaaaagcatagtcttggtaagtgagtggcccatctcttaaccttggaagtatgaacgcgaaagcagatgcagatcactgagcccttaatcgacggcttgaatatgctcaagcctctcaagtaagatttgatttgattgatgtactgcttgactgcttttaaatatgtagcctatgcatgatcaaggaaggactatgtactttccgtgacttttctctttcgtctttcggcggatcggcggatgatgtgaagccttatatctcaggcaagaaattccattacctaatcaccgatctggagcttctagacaaacagtgcaaacaactctatcgcaaagaaaaaaaaaataatttatcgcaatctcaagacagcgcagttcgttaatctcgaacttttgattgaactcaactcaattgcataccttttcaagggtagcctctgtataccttctctaagatcaaacgcccacctccaccttgatatccaggcttctcaatcgctagtcttgtcaatcctcgagataaaccgtaccaatggacggccaaaaaactccttttgtgagggagctcggctcgagtggtatgcatattccttttcttaatgcaaaactataacgctaacctatatctttagaccggaaagtccgcgacaaggctcttgagtctttaaccaaattcgtgcagtctcgcaccgatctgaccctcgttgatctcctcaaactgtggaagggcctgttctactgtatgcaccaccgctatattcgcgcggcataaaccgcagcaaaactaaccttctcccaggcttctaccactccgaccgacccctcacacaacaagccctcgcccgcgcactctcctactctctcgtcccctccctcccccacgcaactctccaccgcttcctgcgcgccttctggatcaccatcggccgggactaccactcactagaccgcatccggctggacaagtacctgatgctgatccgtttctacgtgggcgtggcattcgaggttctcgtgaagaacaagagctcaacaaagaacgcggacgggaaaaagcgcaagcgcgaagacgcagccaagcagggtcgcggcaagaagcagaagaagcaggccgaggctgaggcagagaccgccgaagacgaggaagagaaggacagtgccgaagacctcgaggctaaattccccgatctcgcggcttatatctccattatcgaggagggtcctttgtgcccgttgaactatgatgaggatcaggccccggatgagggagacccgaattacgtgcctatgccgcatggtcctgacggcctgcgctaccatcttattgacatctgggtcgatgagttggagaaggttcttgagtttgaggaggtggctggtgaggacgaggaggagactccgaagcggaagatcaagggcgatgtgcctattgagcttattttgaggccgttggagaagctgcgcgctgaaagtgcctacaagcctgttcggacgagggccgctgaggccttggaggatgagcggttgatcgagtggggtgttcggacaagaaaggccgacgaggaagatgacagtgaggaggaatggggtggcttcgaataaaaattttagttatagtaactgagggtttgtataaacagactgaattcattgcacagcgtgctagcgatatgtccatcaatggcatcacggtttgtattacaaagaagctggtgctagtcttacaggtgtaatggactacaaaatgtattcacatggcacctgtttcatttttttactgtacggcctgaccacagagtatcaaatgtctgatgtgacctattgacaaagcaccaattcccagggtatcatgagtggatgcaaagacccggcaagcaatggatatatagaagactcccaaggatgatagaacggacagcgactttcgtcccagaggcggaccgaaggcacgaattagcgaggacctgccgcctcataaagacggcctgatttggtgagtatcgtacccagtccctggtggacctcggcttggaacgcctcgaaaggcacccgttcaccatcaatactgatgtagccctccttcttgtggggagttagacggaacgcagacgctttgcggatattcagatctggcatgtcgaagaaacgaccactggggatttcgttcatcatactaatcgatgtaccaatgctgactgttccgtcaatagtgatcacgtctatcaggccgtcgtccggcaatgttgcagggaacatatttgtgtctttcgacatgatagccatatttcccgcatagaaattgcccatggtttctcccggaattacctcccacccctggggtagttcgtccgtcactgtaccgtacttgagctctggtagacctggggactctgcagcaatctcgaaacgtttggtgtcagcacccggctccagtggacgtgtagaccacatagcgtagtgttccttaatagcctccttgtcgccaatttccaccttgatggctatatcacaaggccatatggtctgccgcatcaaacggactaggaaaccgtatgtaaaccgctgagcgcccatccaacggatattctcagtacccaaatcacactcggcgacaataccaaaagattgcgagaggaaagagagtgtgcgcgaatttttctgagagatcgagacgagatccagcggggttctcagccccttgacgattgccagcgccgcaatagagacgctaccagtcccgaaggcattccaagtcaacccatttccagagccacatgggagaagtgcaacggcggtttgcgctagcgcttttcgagcatctggccgcttacccaacccattgaacacctcgtagggcaagccgtcgccagagcagcaaacgaccgcatcgtacgcgtcgatatcgagattttccgcaatttcaattgcatgacccctatgttccgtgttctgtacacccacctggcacttcgccgcggcgaaaaccggtgccgcatatcgctgatacaaactggcagctgtgcccttcccaccaaaaggattgaccaatacctttagccgtttgccacgcagtgccttgccatacgccatatcaagtagttgctgtacccatatctcgacaacccttttttcattttcggatatcgggtattggacggtcgttacggaaacatggtccttggcagcagggtgtgcgtaggcgatgacgagattagaagcggtgacttcggcgctgaggatgttgtacaacgggatgtcatggttggtttctggatctaagatgcacgtacaccccggtcagaccatttccatcgacagtagcgcccgcgataacgcggtgatcgccaaaggggccggtatcaacttactagactggagtaatccgcagcagcgacggtctttgcgaggcgagcggtcatctgcataggtaagcatattcccacacactgagtgtggagtaagtagtccatacctaatatgaggagcgagttggcggcgatggtcaaagagacagattggtcgaccgtcagggttgtgccatgcagctcctgcgaggagccgtctgtggaggacattttggataagaatgaagattcaggacattatagataaagaggaacagaggaatagaggaatataagaataaaatactctaggggaagaaaggtaatgatagacaatgaaaatgcccgtatgcagccgcggagttccggtgggcccggggcatgtggtccctgcatttgaaatatgtacgaaggatgaagtatagagtaagacatttttatgtgcataaatagatagatctctctttagaggctactataatgccctgggaatatcaaaagacattgttctctatccactacgccggacgagatattcatctcatctacacaataaagagacatataagtaaaaacaaattcgtctcgaatgaacaacacagacagaagggagggggaaaaggataaaaagcatcatatagaccgcaaaccgctggaaaaaacattgacttatgcagtcgctgccttgagacccttcagagagcccaagctcagtgccaggccttgggagcgacttcttatccgcacaaatcctgtaattggcccatcgtctccctccttttcgatgctcaagtttgctagtgcatcctcgcctagtcatagtcagttagtatgtcaaatagaaaggggtagattattgcaaacataccgaacacgctgcgggcatataggttcgcactcaggaagcggcaatctcccttcagcgaagcatcgggcgtcaagcaggccatattagtgctttccatcagctgcttgaggaattcacggagagtcttggccttcgaattgatgttaaccttgttctcccattcgaactcagtccacatggtacggaactgagtctcggtgcagtgagcaggctggatgtagtccatgatgtcggcatggatgtcgttgaggatgaccacatgggtctcggtggagctggcgccgtcatagacaatgttaccaaagataacaccagtgtctgttgatgaaaccttgaccgtagcctggacgttcaagaaatcgcgtgggcctaggttgttggtagatggccgctcaacgaccttgaggtcaccgagagttgcaaactccacgcacaggttttgcagagtttcggttgtttggttaaccaacaggacgtcgagaacaatgtcgaactggtgaacggtcacataggcttcggcatagactgaatcggagaaaccagtcaattgcaccacccggctgagcttcgaagatacgtcttccacggtcgaatcgccaccagttgccttggcaagatccatttcaatctcctccccgccctcgacggcgttcttcttggtaaattggcgaatggggatggcatcgtcaatctgcacggcactcttggctttctccaccgcctctttggcagccctcttcttatcctcgacctggaccatggcgcggaacgcctttcgggtgtcctctaagaaagtaacttcgagctccttcttctcggagaactcggccagggatcgcacacaagtcaagatacgatccacagaatcctcatcaataggagccttaacgaagtgagattggccaacgcgcatgatggaaatcataataagcatggcttcggcacggagagcgttggtacgagcagtatcttgcgacacctcggaatggcgcatcaccaacttggtcaatgtcgaagagagcaccgttgccaggtagtagtcaccgtccaagataagctgacgcagaggaggcttctgcgcggccttgacagcctcaagacgagctgctgctgccgattggctggtgagagcactttcggtggcataggtgccatctgcaagcacctttcgggatccagtaggtgcggccttggaatggccattggcctgctccatcagcagggcgttgtcatccggaacctcatccaggagtcgttgttcggatgccaaaattgggatttcaccaaggctggctctgatcgtcctccaagcatcccgaatatccttctcctccagggagtattcaccaacaacccagagaactccgcggtaaacctttccagctcgaacctcactcaaagttgaaaccaagcgggcaacgattgacccacgcaagtctggtaatttctccacgacctctttaacgaacgagatcacatcgacagcggagttattattgaagtcggcaataaagtccatcagaagatcaaccacgctagcagcaatttcagagaacttgatagcgcaggagtgtattgactgtaccaatatttggcgatactcgctattctgtggatgtcgttagtaatgctgcgttgcgcaaagtgagcgtacaacctacctgttcatattgttcgtcgacggtcttggcaagttctttcttgagcagcatgatgatttcttccacattcttgctcgagaccatctccatagcaaggttgagggcctttctccggacatcaatatcagggctgctgagaacccgcagggcctccatagtcaagtcgtccaagacaccctcattgcgaattctgagctggtccacgcgttccaaacaaatgagcttgacgttgttgtcggcctcccgaatggcgagctcgatcagcttgctcgcagctgctttgacagcaacggggttgcttgtgagggcggtaagagatgttgcggcttcataaacaacggtgctagtgggcgcgtcgaggagctcgagcataagtttcaggtatcgcgactatttttcgttagtgacccaacactttgatttgagtccaataaacgcaccttattctgagtgttctgtactgcgtccttccggaggaactccaactcggctagctggagcaactcatctgtgtttggaattgtgtcaaaggtggtgcgcagatactcgagcgccttctggtgactgatggacatgagtgctgcaaaggcattgcgcttgcaggtgctgtcggtctccgattcgaggaacaactgaagcaactccggcgcatcgggaatgagcgactcggagtgctggaaaatagacgacacagcccagactgcattcttgcgaacataggcgtgacgatgttgcagacacgaacgtgcggaggagaggaggggctcaataagctctggttcgcggagtttggagaggaatcggagggtattgcctcgaatgtattcgttgggatgttgaagatcgttgcgaatgccgttactgcgaaaggaaaaattgtcagacaggaaatatcatatagcaatggccagggggatccttaccagaccaggatcatctcttgcttgagcttgccggtagaatcgtgtttggggcagatttcatagaagaagtaaagcaacttcttcaatgacttgcttttcgacggcatcacgaagcgaatgatgtgcatgaggatttgcggcattgggtctccattcagcatgatggtgacaattgtccgcattgtttccaacttggtctcatcggtgcctttctccagttgcagctttagctcctgcacggtcggctggtcggcagtattgtccacatggagcaaactgtaggtattttccagaaacgacgccatggtggtggattgggaggaataggaacgaaaagagctgcgagttgtcagttccggggttgttttggggacacatcagcatgtaggaataaacacatacagtagaggtaattctcccgggaacaggagtttgcgccagatatcaagaacaagcaattagtgtaaagcaacacccctcgccagccctgaaatcattagatgttatatgatgcgcaatggggagggaccatcaacttgtcccttaatctggccccccggcgccgtctgtgtggatgactaagccacaacccgccgcttttcaactgccacttcgacgtcgattgctgtccttcttcattcacgtacgaactctacgattgagattcgccaggatgtcgaatgagaatttctacctccgatactagtaaggatgatatgagtgagcccgggtttcctcagctgctgacggtcctcacagctcaggtcactctgggcggtttggacatgagttcctaggtaagcctacgtgccggtcataaacactttcctctacgcagtcgctaacttgcacgcagagtttgatctccgcaccattggcgaaggtagcagtgccgccgtacgatatgcgaacaactcgaattaccgcaatgattccctcatccgcaaagaaagtgagcaggagcatacacaccaaatagaaacgaacacgggctgatatagtaatagtgtgcgtgagcgatgcgatggtcgaagaagtgaagcgcattatcaaggatagcgagatcctcaagtatgcacctggattacacaacaggaagaacaccctcgctgaccccatctagggaggatgactccaagtggccacagaagaacaaggacgggcgtcaagagctggagattcggattggaaatgagcacatttccttcgaggtaattgaccgaggtatttcacggaagcagccatcatctaatactggatcgtatagaccgccaagatcggctcgctagtcgacgtgaccgaatccgacgaccccgaaggacttcgagtcttttactatcttgtacaggacctgaaggcccttgtattctcgctgatctcacttcacttcaaggtatccacaatcttgcccccatgcttgcaacatcttctgaccatccctgctttacagatcaagccgatttaagtattgagcgcataaaagaaaattgaagaataactgggtttttttgtttgatgatactcattaggcgttcattgagggttacctgggatgcgaactcaattatagcgcagaaacaatgagattgatacccctcaggcatgtctgccttcgatcctttctaggcaatttaattattctgcgtgtttgtagctgcttgtagtatgaagatgtcaaagcaagatgcaaaacatggcagaagatacgtagcttgagaatgtgtgttctaaccttaggtcccaggagtgtctccagtccagtcctgcaacgcttgatatatatccacttccctgcaatgccaagtcagcactaattcctcaagcttgggccaatcctggaagtccctcatattcgatcacctcaataacagtggtcaccgggatactgtcgggttcatatttgacgatatcgggaagtacatatcaggactggggtttcacctgggcatccagattgggcttgtataaggaaatattgaaattacttagtggttagtaaatccaaagtcgcgcttccttcaactcgtcctcgaatgcccaagaatgcctaagatgcccaacctgtcctgatttggaccgaatgttggtcatgccattgatctttccaacgtgcaagattgtatacaaagtggatgaaagccgttgattggcttgattggcacgtggcctgaggcatccaccttacataaccaatattgaaagtggcgccgcgccaggcgcagaaacagctgacccacctggactgtccccgcattgctcgttcctcaagccttaaaagacttagttcgctgatctcaaatgatccatcccccttgttctctgtttttctcacaattttgctctggagtgtcttgcttcgattcaatgtcccgtcccctctttccctgatttgcaatgccgactccgagtaacaactcgatcgccgcggcgatcgccgcccgcacgacatgtccaccggagcccgaaaggatctcggcttggcgagactcccccgatagtgtatcgaacagcgatcctatcgatgctatttcacctgataccccaattgcgccctccatgctgagtcgatctgatgatgccggtactcctgagccgatgaaagcgggaggaaagccgacgggcgtcgaggaagatgacccagtcagggctacttcacctgtcgagtcaacctgccttcgcagccagtcaccagcagcgccctcgggatcctcactcctcaactgggaattctccaacgttcgtgtaagtatcgaggtcggctatatccgaatattctcaccttctgaccatcgcattagctcctcccgaaccacacctcgtttctccgttcaggcagcaagttcgctggaactcagcaatcagaccgtcaagtctacaatgtcgatgtcgagattaaacatgttgatatggccgagtcttatctctgtggctaccttagaatccaaggtttgtgattcgtgcgcatcagggacgtgcattgaaccttgctcaactaatgtttgttgttctccacaggcctaacagaagatcaccctaccctgactaccttttttgaaggagaagtgatcggcaccaaacacactttccagactcgtaatgaggaatggggcgcctcggaaaagacagacttgcaccattggtctcggtttcccgcctggcgtccgctggctaaacaggccaaaagagcggatttcacataccgcaacttcgcccagcgtgaacatacattcatgagatggaaagaatctttccttgttcccgaccatcgagtacggacgatctcaggtgccagcttcgaagggttctattatatctgcttcaatcagattgagggaactgtgagcggtgtatacttccatgcaaagagcgaacggtaggtggatgttttgttgctgaagattctcgatttgatcctaacaccatcacagatttcagcaacttgaacttaagcacgtcgaagatcgtggatgtgcaccagcagtcgaattccgctaaatatggccgaacttgcttgctagtgccaaaacgatctcatatatgacttcgtacgtgactaattcggtcctcgtgtgtctcatatcctcttttgttattatttccgatactacacggctaagtagtgtttcttggtcaccattcagaacgagaagcttggttctctcggaactccattgagttcactatcccgtttacctttcctcaaataccctctacgctctcagtctcctctcccctaaggctattggagtgttgatcatcatttcgacagctcatttcatgaggatttccaagaccatatccattttcaggcaaagtctaaatccacacaaatcatcctcagattgaccctcatgtttcacgatatttcaatatacgaaacggcgtttccgtccccgattccggcgacctggttctggttacccttcgtcctctttggagtcctaatctctcatttttcacttcttgttttcttattcctcacctatcttctgttaaattagtgttattatctttcatccaagctgctggttgaccagcctagttattgaaaaacctcactaggtgtgctttgtaatcgtatatatgctcttagactctagggctgtattgatattgctattggcggctccttcgctgttccatccatacaatagatcacagcgcaaagaaacgggcattcttagggactatagtcggctcacaactgccgattaaacactaattaggatgaccaacatctgtataaaacaacggctgggcatgtatcaatcggacacgacggtcgatcgttgattgttcgatctattcctcccgtaatgtacagatgaaccaagtgaaacacgtgaatttagaacaaagcacaaatacgattactacgtatacaagtagcaaaaataaccatgcgagaaacgagatactaaagtagacttggtcccaatccgtttacgtccgagggccatattgagaaatgccaaaagatcgttgcgccccagatagaaactcacgcgtgaaaacgaaacaaataaagaatcaaggaacccaaagaatgcatggacctgagtttcaggacatatgtgaatgaagcgatggttgcagtaacatgagatgacgttatggtatgacttgggcgaacagacgttaaagcaagaaaaagaggcgagcaggggtatcacatgcgatgccagttgaagaatggcgagatcgagcgagtttggatagaaaggacgcttttagattccatggtaatcaatgttcagatgtggtccacatagagagggcgacaacttataaatagagattaggaaggaaggaatggcgcgagaaggagaaaatcacatatatgccgagttttgacgagagcttgagttggaaccgccgctgctgtaatcgctcggagtaggagactccaagacaacttgttgacgaatggagatgatccattcgtgctgtaggagctcggcggcagtggcgcggcgagcgggatcgcattcgaaacagcggcgcacgaagtcgacaccctggtcgctgagttgatcgcgagatgggagcgcgggctgtttgccttgagcgatgttgtacataattgcccactcgttgtccagcgtggaccatggccggcgcccagttgccatttctaggaccacgcagcccagagaccaaatgtccactgcgccttcgcggttgtccagattcgcatcgccacggatcacttcgggggacatatacatcggggttcctgtggtggtcttctggtttttgcgctggttcgtgggatctttggccggctccttgaggccagctacagggccgtctgatggagcaactgtgcgacccgagcgagcgatgatcttggctgcaccgaaatcgacatacttaatgacaccgttgtgatcaagcaggatattctcgggcttgatgtcacggtgcacgatatgtgcttcgtggagatacgctagaccttctaggagttgaagagcataaaccatgatgaccgtttcatcctcgatacgtccgtgctctagcaagctagcgagcgagccaccggagcagtactccatgaagatgtagaccttgtcacggtgcacctcgatgccgtgataggagacaatgttgggatgatcgagcacttcaagcacgcccatttcgtctcggatctgctgggcgatcttgggaatgagctgggggtcttgcaggcgaatttccttgacagccatcaaatagttgctgtccaagttgatagctacatagacagacccaaaggtaccaccgccgatgaactggccttgctgccaacgcagagtaacgttggtagccgacgatgacagcacagtgagtgacctgtcagcctcatcagatccttctagcacctttcctagagcctggcgcttcgcatcttcctcgattctcctatcttcaatctccacaacacgcgcgtaccatgtgtcgcgaacgagttttgatgcttcctcgtcactagtgatccgaccagtgccaatctgtcgggcgccgttgcgttcttccatacgtttctcgttcttcgccgcaagcgaggatcgtgcacccatgatgtcgaagtgagaaatgagaagggacatgcatcccgccactttcaatctgaaatcactgaactgttcttggtccatagacagaagatgtcggctggatgtgatcgccatagcaaactccaaggctgctacagcccacttgaacgtctttcggtccgcagcgtcacactcatcacagatgaacgcgacccagtcgagagacaactccactagccgggcgctgttcatagcacgccggttagcgtcgacatagttggaggaccgttttccaaactctgttgcgaatgcatagcaggcctggatcaaatcattgttctgccagtttctctcattcagctgatctttgatgatagccacactatccataatggtcatggacagtttgaaagagatcttcttgatcttattcaactcgacatttacacgtccaaggtttgcacgttgttcaatgaccatatcaagttggatgcccgtgagtcgtgcgagctccacacgtgcattctgcagtcgttcttgcatgcctccaacaacaatacgtagcttgcccagcctcacatccgttggatgttccaagaactccatttgcatttcctttcctccccaagcaagaggcctttcgggtcggatggccaggacatagggaacatggatatcctgggttggatcatcttctttgaaggaggtagaaaggataccctggatatcagcgggacggttccataatgcatgatgtgcaatcagatacactcctttctgcccgacggatttggtagaggtgacaaggaaatggtcggaaattaagagtgcctcaaagaaatcataggcgatatagctcgtgatgttgtactcggtagcattttcaaacaattgacacagaaacttggagaatcgatagagcttgcgctgacgaatacgcgttgaatccaagatgctcttgtatcgtttgtccatatcctgtacagtttccttgggtcgcgggacgagctcacgctcaaaatggatcatgagacgctgcaatgatctggcagtgagggcactgttgttctgttagttctggaaacgatgcaaagcacgggaaccatacctaaattgttcggccacctcaatatctccaccgtcaagccggcaaccgatatcataggagaatccccattcctgttctagaatttcggcctctttgaaagtgtttttgttggcattcagcttccaattgaggagccggaaatagtatttcatagcatccaataccgaattgtcaaagttttcatcgacacatggcggcaaatcccagccgggttctggcctcgatacatcaaggtagcgaaatttgatatcgaccgccactttcatcaggatttggaattgggaaatcatctgatcgatcaaaatgggggcttgctgggctgggtctttcatgttcttggcataggacagacggactcgaatgatttcctggatcaaccgagagggaaagttgatcaaagttagtagttcttcgatatatggtggcaggtgccgcgcagcaaatgcttccgagttctcaattagagtagtctttgctttctggatgacgacgagaatgcgaagaagcatgccatccttgtcctggagcgtcttcaagccatcttccttcataatgcgatcaaggaaggacgaaccatccgaaagatcgtcctttgcagacttcatcctcggctggctgaaatcgagagcctcgttccctacccagctctgcagcacagccaactcggtattgatgagggccgttatgttgtgccacgcaaagatggctgcgcgactagaggtaaattcctccgaggcaacacgggggttcgccagttccatttccttgtgcgaagagtagagaatctcgcatcgctcgaccttctccacaatatcctcgacttgctgttttggcggttttccgatctcagtctcgcctttaatctggaatccaatgatatcctcaatcacaggacccagacgtgaccgtgcatcctcgatcaactttcgctgcagaggaatacttcggccgcacgtccttgcccgaacgccaatccagagtgcatagctctgggccgccgaccgctttgactccgcggatccgatgagtcgctgcttttcttgtttcacgacatctcccttcaagactgacgccagcatggaatgccactcaagcctctcctggttcttgggatgtttcaattcttccgtacttggtagattatcgtccgggaggaaaagttgagtatcagggtcgtaagaatcatcttcaaacggcacttcggaggatggagagggttcctccaagtcgccatccccttctgacatgaggtttgattgtgagtccttggaatggtgataccaggcttgtgggttcgctcgaatccgttgaacgtaggctttctcttgggcacgatattgcgcgttcggatcgcgtcggttccctcgtttgactgacgatgatcgttggcggtcttcctggagactgatgtattgcggtgggcgccgctgtggggcatacgtatttgatggcgttcgtgccggggcggacgggcgctgagggcgcaaatcgttagaaattgcatcaggcttctcaaggagagtggtagcgccaatgctaattccacgtggccgtgctgtcggtggattagaccatggggtaataacggatgagatgttcggaggggaagatgtgatggtgctcgcaggtgtttggatttggtcgtccatggtctctccaaatgatgagttggctctcacgggatactgggggaattcatcagaagaagagcctgagccatccgaatcagggctggggatttccggatgctgcatgatgattatcccgtgtgatggtccgagagagcacgtctggtgttggaccaaggtgataagaggcgaacacttgtggcggtgcattgtggctaaccggatgacccgtatctccacccattactgtttgatctactgggaatctttcctattttaattctcatgttgtaactacgtggcatcaaacttgatcctgtatttgtatgaagtccgagccctactacagaatatacgcgtccaatcttcagtcagctgctccattgctcagtccgtgtgatctgtgatctcacaatatgctccatccttgtaaggacttctaatacttgctttttcgtggctttgcattcgagattgtgaaaattacatacaatgcataattaatccaagattgtaaataagctctatcaatccttttatcatctcgttctgctttgttatagtttacgcttgaaattggtaaaaatatatttctgtaaaacatattttgaaactcttgagcagttttatatagacttcattgggctagttacaaggctttttaacatctgcttagtaaattttctatattctaactaattactccgtagttaactaactagtacgtagttcgagaaggtgaattccaaggcattacatagtcccttctggaatgtgaaggggctcaagtaacaaaaaggtaaatagaaattaacatacagtcattggttaacgagccaaattaagttgcgagaaatggtccggggtaagattgagattatataagagagtgtataactttctcttcggatcgttctgtgaacaggtagtgattagtaagtaagacattaaagttatgggtaattcgattatattcctgttcagataactagagagccaatgtcttccgagaatgacatacctactgttgagtggttgtggcaccacgatgggtgaatctcaacatgagaacgccttttgtgatatttaatagggtatgtatacgttcagatagtgctaagaccctgttggaaagaggaaagagaacaaatgacgtacattgtatgtaggcatcgagaaaagtcgaatcatttgaactatcggacactatccggggaactagttaaagaaatgagcatgtgacatgactggacatgctagaacttcaaggttcgaggagctagtgcactattttcaaactattggagatttacccctgactagagtaacattgcgtctaggtatggagtacatacatcgatcgtatgtacatcgaagagtcgatcagtggatcggtgggttcgagaatacttcattgaagatcattgatactttgcagcgggtcttaaggtattacctgcatagtctaatactctaaaaagcgttaagatgcaatatattccctttccttgatcgaaccagacccaagtcactgggcatcggaatagagcatacagcacggcaaaactgacctatgatcgagcctacgtcatagatacatacgacgatcgaacatctgatgttgctgaagaaaaatagagcaagaagaccaaagcgcaagagctccgcatgtattcacagatctacgatgatttgatgttgagcacggagtagagttcttggcccgagagttcggcacatgccgggatgccgaatcagcctctaaaaattcccgccaatgaaagcgtgggtgcttatcttgacttgatgtacgggatactttccttggttgtagaccctgtggcaaagagtttagttttcccgccccatgcgttctgcattgtcgtgtggaaccgggtgtgacattcccggagaatggggaatccactggacgatgcggagagaatagcagaagtacggatcctgaatagttatgtatgttgtataggtagattgctatgcgaaacatctatgttgtacgaagaaactgtacactgccaaagaatcatttctatcagcaattgatctctgaactctacatattttgccgtctggggccatccttggtcaatacgaaacagttcaagagataatccctcgcatgtcaaagaatgtatgtatccatggatacgatgtagaattgtaagataagggaaatggcagctgtgattggttggcgcaacacgagacttgagccccggtgataagagatcaaacctccaagggttcaaccacttcacgttgcacatggtaatatcctagttaaaaggaaactcatatatccaacacaccgggtcagctttccatgggtcactatgcagacacgaactggacgcattcgacaaacggattaagcgacagaaaagcatgtactggcccgagaatgataagcaaatggctgtgattggctgctctccaacctcatatctacagccagtcgttgcgggcccgtccaatttcgattcctagtattctcttctgtcagtgaaatgactccaatctatttatcactttgctacaacgtaagttggacctgcatgacccctgcttatcggagggtcaatgcatcgcgtttgagatgttcttcgcaagggaaaaggcagagatgtcgagaaacaaacaagtagttacactgcagagtaaacatggcaaaagcacatacccatagtccgtccgcagtgcaatgtccgagtatagctgaaggatgccaacgcaaggacccgtaattccccggtctgcgtccatggagtgtataccagatcccgccataaacccggcatggctgaaattggggcgggcttggccacctgctatcggtcaatcaaatgaatcatatcataaatgagaatgaccagcttccactatcggaactaagatcgatggtctggtagacttctagcgtcggatggtggagtcatccttagtttttctgggacgctgccagttatttaattaccagtgtttgtccttgcagggtagacatatcacttttctctcctttcactttcacagcccggtgcgtgaaagtattttctatttcttcttctccacctctcacaacgcaggagatctgtattcagttctactgagactgtcgttcgccccctatcacacttgaaataaaattggcctcgcctaggtctcactatggctgaatatccggttgcgtacaatggcaccaccgacactggtggtgactcgcttcatgatgacttgaacatctactacagtgtatgttgtataccccataggagtcaattgagacgcgtgctaactaaagtgtggatagtctggtgatatctcatgggtcattgtatccacagccctagtgttgctgatgattcctggagttgggtatgacttgacccatcccttcctacaccaaagggctttcactcatcactcgattatagattcttctactccggtctagctcgtcgcaagtcagcactctcgctgatatggctctcgatcatgtcggtcggtgtggtttcattccaatggttcttctggggttattcactggccttctcccactcagccggtacctacatcggtaacctcgataacttcggcttcaagggtgttctcgccgcgccatctgtgggaagtgacaaggttcccgatctcctgttcgccatcttccagggcatgttcgccgctattacgtgagtcactcatgcatccatcatggagatactcggaacatcaattgacggtttcttcttagtgttgctcttgctgtcggcgcagtcgctgagcgtggtcgcatgctcccctgcattatcttcatgttcatctggaccactatcatctacgaccccatcgcctgctggacatggaactcgtcgggatgggtgttcaagctcggaggtcttgacttcgctggtggtacccccgtgcacattgcttccggatctgccgcgctcgcctactccctgatgctgggcaagcgtcgtggccacggaacccacgagctcaactaccgccctcacaatgtcacccacgttgtcatcggcaccgtgttcctgtgggtcggctggttcggattcaacgccggctctgctctctctgccaacctgcgtgcggttatggctgccgttgtcactaacctggctgcctccgttggaggtgtgacctggtgtttgatggactacagactggaacgcaagtggtcgaccgtcggcttctgctctggtgtcattgctggtcttgttgccatcacccccggctctggattcgtcactccctgggctgctttcatcttcggtgtcgttggtgccattgcatgcaactacgctactaagctcaagttcctccttggagttgatgacgctctcgatatctttgccgtccacggtgtcggtggtctggttggaaacctcctgactggcattttcgctgcgtgagtgaacctacttcctgacagtatagtctgatcataaactaacttccattatagtgattacattgcgcatctggatggtgtcactgagatcgatggcggctggatcaaccatcactatatccagctgggataccagcttgccgactcggtcaccggaatggcatacgccttcttcggaacctgtatcattctcttcatcatgaacctcatcccgggtcttagcttgcgcgcacccgaggaagatgagatcatgggtattgacgacgccgaaattggcgagtttgccgtaagtttcattattcctaagtcggccacaacgcgttctaacattttactctatagtacgattacgtcgagatccgccgtgatgttgtcgatggcgttgagagctcagaaactgcctccaagcgcactactacacccaccggcgagattgacaccaaggcttagatcagacttgatctgacggctgttctttctttaatattaatatgaggcaactgccttccttcccttctttcttcccttctttcctttcacgttaatacttctttttttcggcgatggcagagtgtcttcaatatctattaccgaactatagatatttgggatactctccggagaccaactttcactttgatagcattcagatacccaaatatcaaattccattcaaccattccgggcagcaaatcaagttaatagagtaggcaaagcgtgacaatgtccatagtagtgcatgagtaatatttgagacaaccccagacaaagaagtaaccgtgagtggcatgccattgaatatgagaatcctatactttagccaatgatgtactcttacgtcgtatactccgcatgttgtagagagctagaacgcgggatccacccatgtgcacctgccggagcgccgcgccgagaaacacggcgaccggcgaccgtgtactgaatgcgggcaatcatcgcaaaccctccacgctcctcgcaaccctctgggcacattttctcttccttttattcatctctcccatcttccgaatagtttgcccatcgattgtttcatcaaaatgtcctttccgaccgacgtggcggagtttgatagtgacccgcgcatctcgttctcgagaccggacaacagcttcctacttgagaccaaggatggtcgcgagttcttgttcaataccatcctgaagagatgggtcgaatcggtatgtcatacacgtattggcacgctggcgctttgcgctgggctgttcgccgacaatccccgctaacctggcttgcgactctagatcgacgagaagctcatccgccagcagcaaggatacggtcccgaagaccccgagagtgagatcgttcatccccgcgatcgtaagaagcgaaagcagtcgcaggagccggtaagtgttctggtcatttatgccaacttggtcgcattgaaactgacttctttcgtctgctagaccgatgagcccaaggtcaagaaacctcgcgtcaacaccgctgtgtgggttacaaatatccccaccgacgctaccttctccgagattcacgagtcgttcaagaaatatggcatccttgcggaggaacttgacactggaaagccgcgcattgtaatgtacaacgacgaaaacggcaatttcaatggcgaggctttggtcgtgtacttccggcccgagtcagtcaccctcgcgattcagctgctcgacgagacggacttccgactgggtgtccccaacccatgtggactgatgcgcgtccaggaggccgacttttcgtacaagcgtgaacaggaagcggagcccaaggttctgactaccaaagagaaaaagaagctgaaggagcgagcagatcggttgaataagtatgtttgttgatcatggcagtagagtgtttcatactgactcgactgtgataggaaactttccgactggggtgatgatgaggctgagcttgccgccaaagccagacaggctgccgaggaggcgcgcaaacatgtggttttgaagcatatgttcacactggaggagcttgaggtttgacacacctcttccaaagttgccttgcgcgaatatggaacccagctgacctgtaattataggaggatccactcgccactattgagatccacgaggacattaccagcgaatgcgctaagattggaccggtgctcaaggtcatggtctgggacggggaggctgatggtgttgcgaccgtccgatttgtgtccgcagccgacgctcgtcgctgtgcccaggtaggaatctcagtttgaatcaatgtgattgcaaatactgaccatcttctagagcatggacgggcgtatcttctcaaagagaactattgttgcttacatctggaatggcgaggagaagttcaagaagcaccgtccccgacgcgacaaaaaacccgaggattcagacgatgagaatgagcgccttgagcggtacggagattggctcgaaagcggtggaaacaagacaagcaagaaccaggaaaccgaaaatgagaaggccgacaaggacgagaccgacaagagccaggagaccaataacgagaaggctgacaagaacgaggctgacaagagcctggaaactggtaatgagaaggtcgacctggatgagaccgacaagagccaggaaatcgacaagaactagctcaaccgaacagaaaacagcgcaagcaattccaccgaaggagcccagaacggtgggaactctgtaccaactgagctaatttcaaacaacgagtgctactgaggggcaagcgaatacttccaagtgaaaggaaagccacgcccaactgaacgatatccaaacgacgagagctactgagaggcgcgcgagtacttccacgtggagggaatgcggcgcccattgaacgaatacccaacatgtatcatatttttcccaattgaaaccattgaaatattattgtactatcttatgtagttgtagttgtagtgaagttagtgtatatagacatagcaaccgaaataggaagtacaagatcacgcgccaaagaaacgcaaatatggttcgcacctccccgagtcccgtgatgcggctatacccaatcgggccccctccccctgaagttcagttgttgacttgttgatcccacacacaccgctcaactggccctcttgctttctcttcttccccatcctctctgacttgtcaccggtcatcctttttatttccatctcttttctaataccttcaaaatgcgtgagattgtatgttatccccatccagacgcgtctttgttttcatatggcccctgagccacgaccccactctgaacagatctttgctaacatgctctaggttcacctccaaaccggccaatgtgtaagttcgacatggaacattcctagaaacattcttcggctcgtgggactaaactggaattgggttatagggtaaccaaattggtgccgctttctggtaagtgccgagcctttttttcgcgttgggtaccaattgacaaattactaactacattacaggcaaaccatttctggagagcacggtctcgatggcgatggacagtaagtctaaagatgatgggctttccggtggttcacatgtctaatatcttgctaggtacaatggaacctccgacctccagctcgagcgtatgaacgtctacttcaaccatgtgagtaccgcgactgggcattgattaagcgtgcaccatctgatcggatgttttttcttaatctaggccagcggtgacaagtacgttccccgtgccgttctggtcgatttggagcccggtaccatggacgccgtccgctctggtcctttcggcaagcttttccgccccgataacttcgtcttcggtcagtctggtgctggtaacaactgggccaagggtcactacaccgagggtgccgagcttgttgaccaggttcttgatgtcgtccgtcgcgaggccgagggttgcgactgcctccaaggtttccagatcacccactctctcggtggtggtaccggtgccggtatgggtacactcctgatctccaagatccgtgaggagttccccgaccgtatgatggccactttctccgtcgtcccctcccccaaggtctccgacaccgttgttgagccttacaacgccaccctgtccgttcaccagcttgttgagcactctgatgagactttctgtatcgataacgaggtatgaagtgcgtcggaaatgctgacatgaagaatactgacaattctaggctctctacgatatctgcatgcgtaccctcaagctctcccagccttcttacggtgaccttaaccaccttgtctctgccgtcatgtccggcgtgaccacctccctccgtttccccggtcagctcaactccgatctccgcaagctcgccgtcaacatggttcccttccctcgtctgcacttcttcatggtcggcttcgctcccctgaccagccgtggcggccagtcttaccgccaggtcagcgtccccgagttgacccagcagatgttcgaccccaagaacatgatggctgcttccgacttccgtaacggccgttacctcacttgctcagctttgttccgcggtaagatctccatgaaggaggttgaggatcagatgcgcaacatccagagcaagaaccagagctacttcgttgagtggatccccaacaacgtccagaccgctctgtgctccgttcccccccgtggcctcaagatgtcttccacctttgtcggtaactctacctccatccaggagctcttcaagcgtgtcggcgaccagttcactgccatgttccgtcgcaaggctttcttgcattggtacactggtgagggtatggacgagatggagttcactgaggctgagagcaacatgaacgatcttgtctccgagtaccagcagtaccaggaggcctccgtctccgaaggcgaggaggagtagtaaggattccccacatcatccggctttcgaacataacgactaacgaatttccccctatttttagcctcgctgaggacattgttgacgaggaggtttaaataaatctcctttgagatttgttcaaagtaatacccttgtgaagcctacattctctaccattcggaccggctttgtgggcgtaagccgcgaacccaatttgtttgagcgctcctaatttacacccttttttgtctattttcctacttggcttgggtgatttgttcgacccctccagaatagcacatagtggaaatgactttcaatagcttttttaatcatgttaattgtagtgaaggattggtgcggcagaagttcatatgggccagtatactagagttcataacttcaaagactatgtcgtggcaatctcacataaaaatgacgctaagtacacctcgtcacaaccgatccctgcctttctttctacagttcaatggaagggacatttcccagtccgatactccttgaactccaccagagtctcctctaactgcttcctccccttcccctcgaaatacttcggtccaatatccgcaacactatatccagtgggataatacttatccccctcgtcacctggcacagcccgccctatagcccgcgtcagcaatgccatcgggccccagcggttccagaatgtgggcttgacatagtacggcgcagcctcccactcggtaaggaagaagcggtcgttctcatccggctcctcagtggacgaagcgaagcgcatgaagtacggtcgtggcagagagaggtagcggaggaatagcctgcgggctgtgaagatggttgagagaagtgctgtgcagaatgcggaggggggttcgtagctgtttagtcagtagttagaggttagttgcgacctgaacatgcaaaccaaaaccaagaaagaaagaaacttacaacatcgccttcctaagcctatcgtccatcataaacgaaacagcctgcaacccagccggatgaaagaccttaggtagcatataaagcaggacagcagtagtctgatccgccgtctcacgattcttaatatcaggcaccatgcatctcacctcatactcatcagcccaagcagtcaactcctcgagccactgaatcccatcctggaacccgactttaccagacggcagtttctcatagctaatatccagcgcatcaccggcactcttccagaatgtcccgatagcgcatcgctccaggtcactcagcttacgccactcatagcgatcgatgaagcgaatcggctgcagcgcgaacagcgccagcgtaaagagcatatcgtcatcgaggatcttaccagaggccctgtacccgctgtgcaggtagcgcgtccgggcaagaccgagacatgcgcgcatggaagtcgggttgttgccgacccattcttgcacgaggaggctggtatctgtgtaccgcttcagggaggtatccgggttggagaattgggttgtttttgcgaggaggcgggatattgaggggattccgtatgtcttttttatagttagaaaatgcatgtgtggatcggtagatcatgacccggattgtgagtgtttgcccatgtgggtgggttggtaactggtcttgtttcatacccggaataacgcgaattgtaagctcttgatgaatatgaatgggaattcgagctgcgcgacttgtttttggatctggaaggcttcttcgtcggtcattttggacattgactcccgtgttggataggcatattgtttgtggagcttgcgcaggcgttggaatcggaggcttgttgttactaccggccaggcgatgaggaggcctacggcgtaggggagtagttgggttgtcataccccctgcttgtagtgaagccagggcatcggtgtaattcatattgacgtgctggtttggggatggcaccacgacagggttttccacgaggttcaaataagaaagtggtggtgacgaggtccacggcactggcccatttacgttccccacaaggtttatgtactattttcttatcatcgtaccccgcgtatgtcagcacaacatatataactaactagagaagcatgtagtaaatatatgtatttactttctaatgtagagattgtaattgggcagtttcaaacgtggggccgaacacattcctgcgttatctaacaggtgcttaagccacagtatatatacatcgcacatgtatgtcacgggtcggaagcactttggcgacgatcagaagcttaaggtcaatataactttgctttgcatcatttaaacctttattgaagttcacatcaggtctttacagttcccatgttatggctatatactctctggtttatgttgggaggatatacaatgctctgcccccacactttctggcagatcattatgccaacacataaaaagagtgacacacactagcgaccaatcaatttgagctcgaaagcccgcaacggtgggaaaaacagcatagtgaagcccgcacccaaccagagacccagatcagctccgccagccatctgcgcgatggggccgatataatacgcctgagactaaactgacgtattagcaagacgcagttaactggattgggagtataaagtcttaccatgccgacaattgcaccagcccaaccgataaggaaagcaactcctgctgcaatccccaacggcaatttatcgcgacagttccactgagaccagtcatagcctctatttcgacggaaaatcatgtgttcctcgaagacaatcacaacgaacatcatgacccagtatccaatcagaggcaggaaagacttgaacacctcgtacagctggtcccggcctcccatcgcacatgcagcatagataaccgtagcgagagtcgtccagaccggtcggtgaacctttccaaatatcccgccaatcatctggaggttcattcccatcgagtacgccccgggagtgttattagcaaccaaggcgaggacattgataacagcacagaatttcccgaaccccccgagaccgtcgtatgctgtcatcagcacgcctccgggactgctgccgtacttggccgcaagatgtgccgagctggcgataacggttccgagtccgatgcccatgaggaaaacaatcgacatggcactagtggcggcgaagactgtggctaggaatatccgggagctcttcatctgcggcgggagatagacatagtaatcggcggcgagcggggcccaggcgagaggaatggacaaggccagggagaagaaggtaagtcttttggccattagttgctctgtcgacattggtgtctggatgttgaagtcgaaatttggccctgctgagcccaccatcacgcatatcaccagcagctgtggcaaccaggcaactctggtattaattagaatatgcattgaagatatcctgggctgccaacacttaccgctcatataattggaagattttcatcccaaacagagccataacccagctggaaacggcgatgatgataatgcccactatcacggaaagatgcccaccagagaccacggacaaaatctggccaccgacgacgctgtttaccatactgtacccgatattggtgaagaggtttaggataatgcaaactttgctggggtaataacccatgaaatatcgggccacgatctatcaagtgcatgagcatccgttcttataaagtaccttctttcccttgtgtcgtgaatcaccgatatttcaatacgtaccaaagtcctgtttccgctcttcggtccccatatacttataaagccaaccgtgaaattgccggctaaacatccaaatacagcacagagggccgcatccctgtagctgaggcctaagacgagcgtacccattgatccaacaatgatattatttgtagccaatgtcatgctaaaccacattaacagcatatgaagtatggttgaaggcgttattggctctcgtttgttgataggaacgggctcgattccgctgctctccacatttttcaagcttgcaatccatcgttgccatcttgattgcggcacgaggtcaggcttttcgacggagtcattagagaagctattcgaggcggttttgtcgaggtaagactggctcggacactcgagagtactcgagctgtcggctttttcgatatcttcgagcttcattatcggatatctcgatgtgtaagtggcttgtaaggattaagctgttcgtaaacaaaagccttcgattcaaatccaccactagacagataaatgccaaagagtctggcgtatagataggatgtcgtagatccacagctgtacaacggtcataaaataggagggaaatcggtagttcgtatgaaatatgacggaggggggagagctatggaatgatagatataaggggaaaaatatccagccagtgcaccatcgtaaggccgttaaacactgacatcaccctgtctacctagtgaaacggtgtaacgacccgagggggaattaaatacataagcattccttagcaatcaaggtaccaaccgagcagcttgcataagtgtccaatgatgagcactagatttgcattaccgcaatacagtcgggaaggaacacgcccagcagattgtagatcatctatcgccttgtagagagaaaagaactacccagctttatcccaaagtggaaggggcttcatcgtgctgtgcaatattgaccatccacaaggacacccaccaacacacatattcggtggattggtaaccatctcatgataccatcaagggaagggataggcgcatgacagccacacgatgaaataaaagtcccgccggcccctgtgatccgcgatacatttcctgtatggggtaagtggcatgctggaaagctccgaatatgcatgctctggaatgctgttgatgcaaggaatatctattagctcatgattctatacaatgctcagatttcaggaggcgggtccgaaatagaggaggaggatgatcagcccaaagctccgttgagcaagttccgcgagaaatgtagcttgtgattgatgcaggacgaatacttccccggggatctcgacgatttgctctagccctaggagaaaaaggtccgagggaaggggtacttttaaatagctctgattagttaatgtttactcctattaagtcactcataacttgacttcattactatatatagagagttcctgcggctattcggttgtcctcggtatctctcatagcccatatgagcacaagttgaagttgatacattctacagaggctaccatgaaggcgtgaatggtgttacacatcccgccatctctcacggtcttctgtattcacctcagaagacttgtacgaatgggatcccgaactatgtgatattacgtagcctgagtctttagctcaggtcatttcctacaagtccagctaagctttcctcctgtctcttctgacccacaagccggaatccgtgatacggatccgcgaaggcgaattctcctagcttgccaggcgttggcgtactgcgtgagagaaatgctgattcgtcaaaaagggcttgactttccgtaagattagattccactgctaacatggcgcgttacacccggtatacaagtgctataatatatctagtagctgtctgctagaggctttctaattcgagctgctaatatgaggacgcctagattccgggtttctaagcaattttaagagctaaggcttatagttagctacttttctggtttgaatactattatctagatattctggctttgttcgtacactaggaatgaatatatatcgtctgtcaataggaaactcgattattatatgtcgcttctttattgtggccaagagcgagattggtgtaagacgaaaatataccttgaggacataaagtattcgatttaaagatccaaaattttcaaaggaggcacaagaagggaaatgagagcagttgatctggtctttctgtcgggaaagaacagtcaagacactgagagccttgaatttacgctgtctctctgtttctcttctcgatctaccaatatgctccatcaaacgtgtctcatctcatttggttttcttcacttgatcttcctttcacctacacaatatccttgtccatactgaacttacaatggcctctgccgatccaccgtccatatttcaacccagaatacgcgatggcatcgttgtgtggattggttgttgagaggatcagctaggagcatgacttggttgtgagtctcaagagctagacgattattttaagggtacctagatttgtcatagtatcactggggcctttgatgaatggttttcttgtccattctgatcaagtagccagctgtttggattgttcgggttcggattcgggtgcggtataaaaacctgggagaatatgcgtgcaatttgtgcctcgggaatatcttccgtttatgaactagtgtattacagggtatacgactactgtggagagtggtcgatctttttctagtcctgatccactgaaaccctgcatcaccccgcgaaatcttggataaattaaagaggagaggcactcgagataggtaataggtcagatttttcagttccggagccttatatctgctacactgaatgatatcacaacagctcagtgagtatacgacagtaagtgtgtcgacaggtggactgacctatacacctcgggagtcaccgacccgatacccctggagtggagatatgcggagcagcaagcttctgatagaacaagttagaatagacctccttgcagaatccgagaaccattcgtattcgtggaaagttgagaccaacccagcttccccacaggtctgtggagagaagcggcatagcatttagcccaatgccaatccccgaggttgccccggttctaaggccgcttgtcgctgctatagataaaaagattccattccttctgtctggggttctattatatctcccttgacatagttgagagagtgcagacatcatgcggtattctctatgggcctctacgcttgtgctggcttcggctgccgccacaacaacttcactgagtgatatatgtacaagtgcatatgcgaagaaggcgttgccagtggatcaactccagggagttaccgttgatccctcttccatttccacgagtctcgtcaccaacttcactgccagcagtatattctaccctaccacgaccttcgattactgtaatgtgactttcgcctactcccatgacggcattgaaggggatattgttcatgtgcaatactggcttccagctccagcacagttcaaaaacagatatgtgtctacaggtggaggtggttggtatattaactcgggcactcaatcgatccctactggagttatcgttggcgggtacgtatttactcgtatcaatttggtggtatgaatgtctgactgacagattacataaagtgttggcggattgaccgatggaggatcaggaaacttcgatgccgcatttagttccgttgctctcttggcaaatggaactatcaattggcaagcgacgtacatgtttggtaataccttcatacttccgaaactcacagcttacgggtcagctaacataagaaacaggctaccaagcccagcacgagctcgctgtattgggcaaagcgctcacgcgaaatatttacaacgtaccgtccagcgagaagatttactcctactatcagggttgttccgagggaggccgtggcggatggagccaggtccaacggttccccgagcagttcgacggcgtagtcgccggtgccccagccttccgctgggcacagcagcaaaccaatcatttgacgggcaacgtcatcgagaaaactcttgactactacccgcccagctgtgagctcgagaagatcatgaacatgactgtcgcaagctgcgatcccctggacggcaagacggacggtattgtatcgcgctccgacttgtgtttgaagaatctaagctgggattccatcctgggcgcttcttactcgtgcgatgctgtcaccggctctgcctacgtgagcgccacacctgcgcagacaggcaatgtatctgccaaagccatcgaggtcgtcaaggccttttggaagggtcttcacgactccgacggcaagcgggtttacttcaactaccagcctggttcgactttcgacgatcttgtgagcgcatatgattctaccaccgacagctggaatctcgatataagcagtctcggcgggacgtgggttggcttatttatcgatattttgcaggagtccaacattcccagcttggatggcgtgacctacgataccctcaaggaatggatagtcctttcccaaaagaagtacggggatatactccagacaacatacccagacttatcggacttccaagccgccggtggaaaagtcatccacgtccacggagagcaagactactcgattccgaccgcttcttcagtccgttactggaactcggttagggaagttatgttccccaacaagtcatacaaggaaggtgccgccgctgtcgatgacttctaccgactgttcctcattcccggcgtgggacactgtgccaccaacgattaccaatccggtgcgccatggccacagacgactctgcagactcttattggatgggttgagaatggcacggcgccggcgacactcgctggatctggtgagattgaaataatatgtcgttggcctcttcgcccgctttggacttcaaatggcaagaagttccaatgtgtttatgaccaggaatcgattgatagctttagttatgatttggatgcgtacaagcttcctgtgtactaagaagtacctcgtcaagtgagggttgcttctatttgatgaaaacactgccagctctttcaatcaacagctggacttcaacctgttctattcaatcttttctgtgtatttttatttatccccatgccccaaaaaggtccctccttaacctcatatttgagtactccgtactagtgctagtgatatacatactccaccatggttggccaataattgaagacccgcatttcgcacaatgtggggttcgaacacccgacatgactggctgatactgcacgtgacttccgaatagcgtaggaccaattatatgtcatcataaagacccacacccgtataacctcaaaaaggacctgtaaaagaaaaaaaaataggtagcttctctttgattgagcgtgtcatccttagtgcaggggccatgctaatcttctctgtatattttcatttgaccatatgccccgaannnnnnnnnnnnnnnggtagcttctctttgattgagcgtgtcatccttagtgcaggggccatgctaatcttctctgtatattttcatatgaccatatgccccgaagggcgaagggacatccttatagttcaatataacctgcattctgggcataattataccgcctacgggtttggaattgggcaaacttgaggaaggcaggtttgtatgttaacaagtgaggaaggagtgacaatacgttcaggaaagcctaataaaagtgagactaaactacaaactagtaagagaatatgaagatcaatatactaagaaagaaatagagggaaaaaacatggtatcttcagatctttgagcattttacaatcaagtatagtaaacgaaaaagaaaaggaaaatgctagatggcaccggagcctttgcatgcgccgagatatccaaaacgagaaaggccagcctggccgccaaacccaaatgcaaatgattgtatgaagcccaaaagtacaaaagtagtctatgcttaattttcaacagcgttacgccgaatcacccatttccagacaccgaaaatagagcagcagagttgagacgagggaatataggggcataatgaattaaacatgtccccgtcgatcggggaggagagaaaggagtagaatataagaaaggcgagatggagatgaactcagacgtgcgactgactgagactcgatctcgatctcgagcgctgagacaaggaccgacggccacggctggagggcgcgcggtccggcggagcatgctcgaagaacggaatcagatctgggttctgactcgggggtgtcttggagtcaggggagtactcgttcaggatacgatcatcagcagcggtgtctgggtggatctcaatgcctggctcgcgatcaaggccgctgtgagggcccccgttggttgggaaagtgacttgttcgggctcatcgtggcctcgctcgatcggagaccatccggcaatactgccggcaacgatacctgccatggcagcggcgggtccgaatgtcgagttcgagcgcgaccgtgtgttgcgtctggaacgagactctggggtggtcggctgtgggctgccgttgtcgttttcgtggtcattgtcgccattcggtgtgggtggcgtggaggaatcacgcgagcgggagccactgcgggaccgaggaaggaattcctgagggtgctgtagcttgtggcggaggtgtcgcagacggccaccgcggacgcgcttgaggaaggcgagctggtcgcggatctcttccagagcggggttccactcgtaattgcgatcctcgtctgagatgaccaatgcgggacccttgttgcgattccagaagtgaggaataagtctcgagatgaattcatccggaataagacgaatgatcacagcgatgggtatggagattgctccgagcacaagactcacggcccactgcgagccttcgttaagacgcttgacggagaaagcagcgccaccaaagaagatgatcaagatttgacccccaataatgatgatctgaataccaatgaaccaacggtttctcaaaataccttccaaaatgttgagcttgttgtcaatacgacgggagttgtactggttgaaaatctgcataaacacgaaagtgttgaagaccacggtctgcaaatggccgctatcccaagagaaaatcttatctccggcgaaattcagaacgaaagttacaaccagctggtagatggactgtccaatgatcatcttccacattgtcagagtgatgagtggatcggatttcgactcgggtctgcggtcaagcactgtttctgtaggagggtctgtcgccaaagcgagagcggcaaacgtgtccatgatcagattgacccacagcaactgcactgcgctgagcacggagtcctcattatcactagcgactgcagagacgaaggtcagaatgacggcggtgatgttgacagtgatttggaactgaaggaacttcttcacggcgtcacagacagtgcgaccccatgccatagccttgacaatcgatgagaagttgtcatccatgagaataatgtcggaggcctctttggcaacttcggtaccagtgatacccattgcaaaaccaacatcggcattcttgagggcaggggcgtcgttagtaccatctccagtgacagcaacagtctctccaagcttcttgagttgattgaccagaatcttcttatcttccgggctagagcgggcgatgacctggagtcttgggatgatttggttcatttgacgtgtgctcagcttgcggaatttgggtccctcaatggcgataccgccaggtgtgtagataccacactcctgggcaatagccttggcggtcataatgttatcaccagtcaccattctgacaaacactccagcacgttggcaagtatacactgcctcggcaacaccggctcggacaggatcctgaataccgaagattcccaacattgccatgtccttgaagataggttcgaagactgcctgggtatcatcggtttccgaagtaggggctccacgaggtggccattgatcgaagtcacggtaaaccagcgcaatgcatctgagagaacgagtggcgtaggtggtcataatgctgtccagtgcagtcctgttctcatcggtgacaggagtctccgacagagtgtcagtggggtcttggacgatacgagtcgacttgtgggatagaatttccgcggcacccttaactagcattcggtattttccattctccagctgcgtcacgactgccatgcatttgcggccagaatcgaacgggaacatctggacgaccttgccatttgctctcgcttcgccaaggggccccaatccaaggtaatccctggcgaaagtcaagagagcagtctctgtcttggatccgacgtacgtcttgactccatctgtctcaccttcaaatgcggttgagttgtagacaatggacttgaggaggacatccttcaccgacggtgatagggaagagacaaaatccgagggagtgatttcactctgatcatcgctcgagacaccagaatacttgccgaaccgagacgtggtacccaacgtcgcagccactgcagtcattttattctccgtcaaggttccagttttgtccgagcaaatcgtggtagcgttacccatagtctcgcaggctttgaggtagcgaaccaagttgttgtctttgagcattcgggttgtagcaaaggcgagagcgagcgtgacggccagtggtaggccttcgggtaccgcgacgacgacaattgtgacagcaacaatgaaaatctgcaggaatgcttgacccttggcgtccggaccacccgcgatgtccttaagacgaaccaaaaatttgatgaagagaaccacaaacagcaacaaaccagaagcgaggccgagcttggcaatgtactcggccaacttgttgagcttcgtctgcaaaggcgttgtttcgccctcctcttggagggacatcatcgtccggccgagggttgcgtgtgtaccggtagcagtgaccacgaacgtgccgacgccctcggagaccttggcaccagaaatgatgaaaggatccatcttcttcaggtcttcgttttgttccattgttttatacacttcatcgccgggggttttgcggagaacgtcagactcgccagtggccgaagattcgtcgcatttgaggtcgtaaccatcgatcaagatcccatcaactgggaccatatcaccgggttccaaaaacatcacatcgccaaccaagacgtcgtggacagaaatttcctcggttcggccggatcgttttaccttgacctgtcgattctctttctttttgttgagttttgcgaactgttgttccttttgccagtcattggctgcaccgaccaccaccacgataataatggccacgagaatggccaaaccttcgacccactcgacgccaggttcgtcgggatttgctgggtggagcgattgcggaattcccacagcaagtgaaactatagccgcaatggtcaataagatcaacaccttgtcgttgtaggcaatccatgccagctcccagatcgtcttcaatttcctctctggaagcctattatcgccgtagatacgtctgcgatcgacgaaattctctccgttgtgctgcgttatgacggaaccctcggtcgtgggtggcggtggtttagtcggagaggcagacttgggcatgttggttcccgaggcaggtgtggtgggtgtgaccacctcgtcaaagctgacagttccgtccaggtttgtctcatccacactcaagccactttttatatcagtccggagccctttttccagtcctcgcaggcctcccaacgcatggaaggcgccaaagctcttcggattgagaagcttgttcagctgaccaggggaaaaggcaaacttgttatcctcgacctcaaactcgtcttcgcggccggggtctggggacaggggatcctcatcgtgaacgccgtttgtggcgggacttttaggcgaatcggatgcggattcctgagatgatgaggacacatatgtgtcgccgccgtaggtgctcgatgtttggttggtctcctccgactccaacgagttgcctctcgagcgtgttccagggacggaaaggaagttggaatgtgtctcggccgccttcgtcttgggcgatgagatgttgtgaggtgaggttggccggctctctcggtcccgagcttcggaggatgcattggagcgaattgatgctgtggaatgcatatccgtagaagaggcactgccattgcgactgccattgcttagcagtgcggttgtatcgggggcatgtgcgttatcagtgtacatccgtgatcctcccgagcggatttgtaaaggcgtgtattcgttatccggggggttcacggccgaggtgtcgatagtaatagtcggcgcgcgctccctgcgcagggttgacgattggccgggctcatcttttgagcgtgggtcggacattatgggagtgtctattcaaggcgcgattcacgcgttggcacccgggtttgtatatggggtcatatggatcaggaggaataagtgtccagagaatgataataactccctaaactcctaaactcctaaactgtccagggttgaagatgaggtaagggtgggaaaagtgtgaaagtgtaaaaacaagcttggaagataggaggcaagcccaggtaataatcgcccccggacagacgtcaagtcaaacctctatccactccggtcgagaacttcctaatgcaattgatttactttcgttactccgtacggagtattggctttcttcttttttcttaacttctccactttgggggggagacccgctagcacagcccctactgtgattctgcagatgcgatgtagatatgtgatgtaccctacttgatatatgacctggacgtgctattgttcattgataagaaggcaggggaattctccatgacagtgagaatatttccaggacatttccatgggtaatcggattatgaaggagcaaataccgcagcgatgcaccaataccaagctatatagcgtctgcactgcctcatttgccaagacatgaaaacatgcccgaaatcccgattcggcaaattaggggggacggcgaaaataaaagaaaagaattcaaggcacgaacttggagaatctgcataactggagatcgagtgggaattaaaggaacagcatcgtacattaaagcccaaacatccctttatgtccgagctagttgtcttttaatatgcccttgccaaagtggtgacgtctcctatttatatgatcgacgtggactccgtaccggcacggagtccgactgtagcaggtccaagacttgttttcttttgttttgattgctgtacaatataaaatcaaactctgattcccggaacttgacggaccagatctccctaactggtttggccaagtacggacataacccgctattacagctcacaccacatacgccacactcagaccattgatccttgcatcgtacggcatatcaattgactactctgtatggagtctctgtatggagtctctgtatggagtatgaactatgaagtatggagtacgatgtactagattagctcgaggtacaaagcttagaactgtcacatggacataaagtaggtgtagctctgtaaatccgaatccggcatatagctacggagtacattatacaatatatacttcaataatttcccgtctccgagtaacacatagaacacatagttcagcaaaagagaacaccgaatcagaaacccctaaaacaagccaaaccaacaattccaatcccaattccaatgccaacattcgccacctctcaaaccacaaaacccaatcaaacccagaagcctcaaaagttgggaaacatcccaaccaacaaatacggcctcaccgccgtcttgcccttacaacatgtacccagcaccaacctccccccacccgaccccatttaatatttccagtctccgcaaccccaatcgcagaaaccccactagcacaacgcatcaacgcccatacccatgcacgcacgcaccacccgaacagacataccactcacgagcatcccaattcaggctcgcaatcaaacgccaccggttcccgtttgaatcctgggtacttcgacgataagacattcctcctcgctggcttgttgcatgatattcggaccgccgaggctaatatcaccaggctgggctttgagtacctccgcggcgtgttggcattgcgtgtcttgcagaatggtacagagtccatcatagctccggtgcggtgatggccccgtgttaatgaatgggtgagtaaagcggacgctgtcattcgatactaggatttgtctctggtttgtaatatcatggctgtgggacggttgctgcagctagtacggagtaccgatctcggtatataaattcttgatgtttataggttgatgtttataactatctgtgagtatgtcaattctcatatctatgttaggtttcgaagcattgacctcactttatcttgaactttgacttgactttgaatctctgaatgttgtacgagatgtttctcaaacctaatttcctctgatatattgttgacaaacgatgttgatgcattcgtagatgtcctatcgacatgtagttgtagaaaaatgaagtaacctgtcccccttccatgttcgatccagtttccttcgtatcaagcctcgccgttaaaagactaaaaccactcaaatcccatgctaatgtacacagaacaaatcgccgctagatctactgctcccggtttacggacgacacgatcccaagtctcttcttttcttcttcggagatcgtcacatcccagatcttcaattcctggcccttttcgaaggtgttgtggtccattggggacttgcgctggctggagtcccggataaccaaggccttgctcgataaagcgagcgcgtccacaagctcggccatgcgtcgggactttgtaaaggcacgagtgatgtgctcgtagtttgcaacccagatagacacaatcatgcaggatgtcaataggtcgtgccgctcgagggcgtgactggcgtagtacaacgcgttatgccaatcgagaatcagctctggaatgtaggtcgtccgaatgtgttcgaagtctttttcttcctcggctatagaaccaattagtcttgagattccaatgccgtaacatcaagtacataccatcggtagatatgggtagccagtcttcggcgaccactgctccaacccattcctctagaatactgacgcattcgttcatgtcttgacccatgttctgcaaggtacccgagtcacgtcgacgtttggtcctaaattgattagctttggcaatgagatgaatagggaagggaaaactcacttggacatctgctcgtgcaccagtgcgaattgctccacggcatcaaacccaagagccagactctccagatctagaactctatgagccctgtagtatgccgaaactagtgcaacgttgttggagccggaaagacttgcggaaagacttcgccggtggagactgtttctctttgatttagtggggctagttggtgtagttgcctcggtctgtagcccttcttgtggaggcatggaaatgatgtcggatccgaatttgtcaatcgagatatcagccaaccgaatacggaaactcaactcgcgagcagcggcaagcttatcagcaactagtaaagtcagttcggttggattcaaacactaggaggaacaacaacatacggaagaacttgcgatacagccaggatccaagatcgcaaatcttatcccactgtccatctatgtagcgaagccactccagactgcgaatcatcctgtcatcttccggagcgacagagttcccaatcaagtcggtcttgggtgacactaatgtccgggaaccgtcaggtcgtcgcagcaccctcgaatagccagtgactcctctagaatgttcaatcgcagggacatgttctttcacccacgcccattgaacatcaagaacagtttccatgttaatatgatgtttccgtgcgagtcgaacttgttgtatcttctcttgtgggtcaacgatttcaataagaatcttagctagaatttcgtgtcccatctgtgcggggaggagagagacgtaaagtgggacaaggtggaatagacccctgtcttccaggttggcgatatgcccagccacgatcactgacgccgtttcaacgaaatgggaatccacgcgggcgtatcccctttcactagccacaacgtagacatgagctgcaatcctgagagcttcttcgtcatcggcagctatgaggaaagattcatctactggcttgcgcacaatctctggaatcacagaggtattcccgtatttatcggcgctgacttgagatacagcctgagcaagagcagtgaagaatgtatcgtagcctttgctaagaatcgtggcctggatgttgcggaacggattacgcgcttcgccgctaacccggtcgttgcccttgagatatacaaggaacttttgaagttctgcgtgcccagctggttccggcttgaatgccacaggggtattgggggagtggctgagtttccgctggaattgtttgcagaatccctggtagcgtgagagcacgacacggttgaagtacacgtaaaggaagtcgtcccagctccggcagacgctggctgcagcatcggtttcgccacaaagcagggcgtaaactgctcgttgaaattcatcggtattggggtcgcgtgttagcgcagagcaagcggtgcgccatgcatcttgggctcgactgttcatcaaacgcgtgtggccatcgtcagatgggtatcgagtacttgccgacttgggatccacactagagccgcacatgctgacggccctccatccttccagacgactctctgcccattcgcgaatcttagtccagttttcgccctgtctgagcatcttccagcatgttatccaggtggcgcgctcgaagaattcgtcctccttctctaaaccgtgcttctgacgagtgagagcatcgggatcgagctgagtgactagcggtttttgatcgcctttgctcagaagcgagcgcgagatgcccgggtcattgggttcgaggggctgtggccaggcgcgcagacgtttgtgacccttgatcgattctttggtataaagccaaccggttgtccacaacccttggccccttcgcgattgttcttccatttctgtgatcagggtgtcaaactgctggctttcggtcttagatgtctcttccaaccatcgcattgcaaccacgcactcaaggccatattggtcagcattaaggaactcttcccacatctcgcgatcggttgagtagcggtgaaggttctggaaagctgtctgtcgtcctgccttgtaactagcccggctagaggggtcgtcaatgctgatcaggttgagcaggaggcgccaagtgtcggcctcaagttgcaaccgccgtatctcctcgtagcttttgtgctcttgcgacccgcttgatcggaagcctgtctttgtccggtccacgatttgttgtgtctggatttccttgatcgcattgttcgcaatgtcgcgatagctctgtacaagcttgtaagctgcctgggcactgttgaaatcgtcggttgaattggcgcgcttgaactgatccagcttatcggcgaatgcttcgatctggcgagtgacgcggtccgctgtccggcgaagggggtgcagcgcctcctgggcgcccgccgcggtgaacagcggggtgtctgggacagagtttagtaaatgcgatctagacatagatcttgagctaaccttgagatttgcccgacacgccaaagacagacggctcatcagaaacatcggacccggtgtccgatacggtgtcgccctctgtatctccgtccatgtcctcatcttggtcttccgattggtcttccgactgatcttccgattgatcttctgattcttgttcctcatcctccaattcttcatcgtcatcgaaagattgttgcgaatcatcgtcaatagtgatgacctcagtttggcgctgggcaacctacacaaaggattagtacataaacaaatagccaagatcaaggataacgaactcaccggtgtgaatgacccggcggccgatcgagttaaaggcgccatgatgggagacttggttagaagggaggagagaggagctctgtggaataagttgtgtttgtctcttttggttttcgtgactgactaacccgaacgggactagcggcaacccccgaagctatttcaacgaattttcgcccgcgcacttctcttcttcttttcttttcttctctaatgtctataggctttcattagagtctcggtatgaaaactcaattttcgtacaggtccatgaggcctctttgcgtgctcacgattgtcttataataaatgcagttcttcaattagcctggtttcctccatatggaaactcagaccgcaaaggaattgtgacatcctccatcttcaacatgggtcacttgaaattgaaatttaaagaagcaaacgtaatagccttactactttacttccctgctgcctgagctcgttgcttcatcttcaacttcagcaagtttgctttcgggcagctgacggtagacgcttggtcaccttgctgttggtagaaggcattgcagcactcatataaagcatcaatttgtgcctggcatctgtcctcattgaaggagtttttctgcaagcagtctagcttggttagacctttgtgtcaacatgccatgaattggaaaaataccttgaatggcgcactgttagagagtcagtaagagctagtaacaccatccaggcactctaaatggacgctttcagatatgggcacatacagcacgcggatggcagggttgatcgtgcgacagatcttgctttaaattaccctaaaagaatctcagcatctagccaatatgtccacagtgatacttttcataccataatgcaagtatcaaagactgtactccgtacaaagcgttgtagatactgttccttggaagtgacgaaagtgatagaagagccaaacgcaaaatagattctccgccttcagaccgtggggcgagtgtgctattctgccgtcgccgctgatctctcttcttcctctcttttctaaccaccctttccacaaccttcactatcgcgcttctgggctttcgtcgtctaggtgagtaccccgtacttcagttgtgccctaaaattgcgttgaaatcgcatctaaccctcctttttgaactcttcagacataattcaaagccccgctcaaagaggtttctaaactcgctctcgctcctatcattgtaagcattcttcctcattgacattctggcttcataagaagtagccgttgaacgaaatccagactccgacagttattcatcatgtccgacaaagaaggcgctgctcctcccaccgagcacctgaacatcaaggtgaccgataacaacaacgaggtgttctttaagattaagcgcacaacgcagctgaaaaagctcatggacgccttctgcgagcgccagggcaagcaaatgtccactgttcggttccttttcgacggcaccagggttcgccccgaagattctcccgacactgtacggccattcccttctttcgtcatttattagtatctcgaaatcttgaaactaacttcaaatagctcgatatggcagatggtgataccttggaggtgcaccaagagcaaatcggaggaggttgctagacaacaagccttgtatgctagattcgcacttcccgacggaaccgaggctactggagcgacatacgttgggggatacgctagggctgctggctagcggtggacagaggatcctcattgacggcccatgggcgaagcggcggcgttcatactgctttttttcttatgaatgatgattatcaaaagcccttcagtcttctctgcagactttgagggtgctttcgctatgttatgttttcctcgaggtcgaccgaccgcatcgcgtagacataggtagtctcattttggtccgaggctttgtatttgaacctggaagcgagaaaccaggacttgtgccaaattatgaagactttcttctggggggggcctgtttcatccgttagtttaggtggtttatggggtctcaatttagactgcgcatacacttactaggccctgctatcaccagtgatcgccttataacgcggttaccaggcaatcgaatctagggcccaagaaccgcggagttgtccccccatgatcagttgatcgaccacatgtgttcttcgtgggatagaaagtgcaagataaccacacacaaagcaataaagagacgcccattcatcgcccatggtaatctgtcacacagagagaagacataaacaatccaattcaacaaatatacacatgcatagagagcaaatcgcctaatataaccccagaaatgcaccctaaagcgatctaactgctccaaatagaagccttcatcttctcctcctcctccttagccttagccttctcttcacgctctcgattccgcctccggatttcctgctccttaatcgagcggtcataagcgcgctgctgctctgtccgcttcggggcgcggatccccaacgcaccggcaatcaaccgctccgcaacggcagtctgcttctccggtcgacgggtcggggggcccttcgccgaagcaggagaagcagctctcgccgtccacgggttggaggtctgcggggagataggtgtcggcgggggacccagcggtccctcagcgctgatgcttggagagagcagctgggaagcgtattcgtcgcgggattcggcttcctcgctttccgaggcagagaggtctgcttcgtcttcccaggagtctgcgacgggtttgcggtgtattttagggttggacttgggctttgaggtcacggctgctgctggaagttttttcacgtttggtcgggagatgtctcgcaccgggcccttttcgcctatggacaggttgcggagtgtggattcgagttcggcgctggcgctggcgcttggatcagacattggcacgtgaggttcgggtgtaacgggcgataaatatacaaagagtgtagtggtaatggtcaacgagagtatttaatacacagtccaatttaaggaagatttgtgcaggctcgaaatagaacgaatggcgtcagtgccggtggcatccctggtcgatcgtggagaacaaagaagggctagacctttcgggttcggctgcctcaggatagtcaggcatcaatagagtcttttttctatttatatttcagggatagtagatcagttatattggattcgtaatgtctttggtggatttatcaagtacataatgctaacattcagcccctgacgttggaaacatccgaagctagcaaaagaaaccgacttatagatcatctaggagcatcaaactattgcaacctgcatcagaagaagttatagggtagtaggagtaataaagtgcacaataaacattgaagaagtgactagcatcattctagatacttcgatattctatctgccaatagatcctttctactcccatgtaccaaccatcttcgttctttcccaaaactgcacccgagcaaagtcactaaagtgaggccgttactcaagaaacgggtctggtgaaaagaagctggggttttccaagatcatatcaacgataccatcgggtcgtggccgagtactccccggtataacataacaaagaagtttgggacgtacggctgtaatgctaaaacgaggatctgagcacacccaatggactaggctataaaagaagaaagaaaatcacgataagctcggttgaaggtctctgcagtgtagtgttcaggtatacctcaactggcatctggcgggttgtgaataggaagtttaatagagtaatgagaatataacaacctactgacttcgagtgttttggaatttgactcgtaaattcaatgaaggtcaccgaccatggcttccatgcaaagccgatctgtggccgaaaaatttcggcaacagcggtctctcaaagaaaaatatatccaagaatgatgcatgtaaatctatgtctatatatatctttctttgacacacagtaacatcgagagagtaaagaaggtagtttttcttcgtgacatctatacggagtatctccgatcatatcaattgtcctctatgctagaatcatggttgaaatccgcgctgcagccaaatgtacggaggtgactcctcaatgtccagtcgagggcaccatctacggctacgcacctgatcttgtattcagcgttgagttctgtttgatattcggtgcttgttctctgatacaactcggccagatgatcagatggcggctttggtcttttagtattgccgtgattctcggttcttcgactgaagtgattggtaagtcaaattgaaactctatgagaatcactggagactgcccgggagaatactgataaaagaaacaggctattttggtcgtatattgttgaaccggaacccatattcatccgccggctttaagacgcagatttgcactttgacactggcacccgctttctggtcggcagctatatacctcacgctgaagcatgcagtgaacattctggggcaacaaaactccgcactgagggcgaagtggtatccctacctctttgtcacctgcgataccgtttcgttgattctccaaggcgctggtggtgggcttgcggcagcagctaaaacaaccaaagctagtgatatgggcagcaatgtcatgctggccgggattgtttggcaagtggtcaccttgacgatatttggggtgatgtcgggccactttcttctccgtataaagaacgccccaaaagatggattgacggttgaggcccgaaaagtctggaacagtcgcaatttctgggtattcttttggggtatctgtgtggcattcataacaacttatgtccgttgtgtgtatcggtaagtcactggtgataatatcttgatatctgctgagtactgatattggagtgtctagcatcgcggaaatggctggtgggtggaaaaatcacataatgcagaacgaacttgattttactatccttgaatcgatgtaagtcgaactttgacaacacaaattggaagcatttgaaagctgatggatcctagaatgtgttcagtctctgtgatagccctatgtatcacccctcctgggtatttcttcccgcaaatgcgtggagattacactagattagtgaaagaagtggatgtgaaggaaatgaaggatgtgaaagatgtgaaggtctctatttcactgtggccagagccaccacgctatcaggaatttatttgattctggtgaagttacattatcttttggctagatggttgtatattaatgagtgagttgttttcaggatgatttcagatctagacatagaggtttagtggatgttgtttctcaagaggaatgagggaatatatatttataaatcgttgcattagattgaaaaagagatctatgctgatatattttatctagtatgaccatatacactttgaaaggcaaagcaactattgctccttagccaacgcgataaccttctttgcagcctcctcgaatccatcaaatgcatgcaaaggaaggccactctccgcaatctacggatattcaagttagcaactagacaatggcagcggatattcggatcatgcttaccatcttctgccccagttcctcattcgtacctcgcagtcgtacaaccactggaaccttcatattcaaatcccggaaagccaagataatgccctcagcaatcatgtcgcagcgagtcagtccgccaaagatattgacaaagacggctttgacgcgcgtgtcagagcaaattacgcggaatgacgccttgactgtctccgaagtagctttgccaccggtatcgaggaaattcgcgcagtggccgccgtggatagtgagagcgtcgaccgtgttcatggcaaggccggctccattgactgcgcgatattgtgagcgaatacccttttccgactaaggaatagactagaatacataccgagtgtgccaatattgccttcgccttccaatctgctgtatgtcagcaaagatacagacaaactagggagtcatggatgtgctactacatacttgacgtaaacaattccgtccttttcggcttcaacctccgccgcgacctcttcggatatatcccgcagtttatggatatcttcctgtcggcccgagctacggaatgcagcatcgtcgaagccaaaacgtgcaccctggacctccaaaacatcatcgggcgagatgccaatttgcgtctccagcgtgaaggcctctttttccttgtaaatttcccaaagggcttgcagaatgccttcaagctgcttgtgagcagaggctgggagacccaactgctcggcaacatcagcgatgacggagctttcgaacttgctctgagtgtaagggaatgggaatctttgcgactgagccgggctaaatccggaagtcgccgaggcaataatgcatggcgataaagctgttcggtcgactgcaatggaaacagaaacaggactatcagagttagaagccgactcattgacagggacggatttctgcttgaggatgtcgaatgcctggaactgcttgatgtacagagtacgcttgtgttcagtgttccgtctcgaaattggcgtaactcgtctcatagtatgaaagccacgtttttgtgagccagttccagacattggctatgagtagttagtatagctcagattgggttctcaaagaaacaaactcacacggctagactggttcgcaaacaaagtcttcattccttcgccgaacttctcaggatggttaaccatgaccgcgccagcacgttcaagtgcccgatacttagtttctgcatctggttccccaggcgcagcccaagcaccggcatgtcccataacccgcccaggaggtgcttccaacccaccaacaagggccataataggcctacccaatatcagcattgcattcaaaccccgtcaacaagacacaacaacttacttaggatccacagtcctccgtcgataatccttaatccactccgcagcatccatctccgccgtccccccaatctccccaaccaaaataataccccgagtatcaggatcatcttcaaagagattaagggcatcgacaaagttcgtgcccgccagcacgtcaccgcccatactaatacaaagactctgaccaagtccagcccgcgtcgtcgacgcaacagtctcatagctcaatgtcccagacttagccacgataccgacattgcccggcgcgaagcaaggcaatggctggaagccgattcggcatttgccgatggcggatataattcctggacagtttgcgccgacaagacgggttttggattgcgtttgtagcatggagtggatctgtatgtaacacaatcaatgaaaagaactcttcgattactagcacggttcactgtgagtaggtcatacccgaaggatgtcgtggatcggcacatgctccgctacagccacgacgagtgggatttccgcttcgatggcttcttcgatggctttggcggtttggtttcctgggacatagattgcagatgcgtcgggttttgcctgttcttgggcctggtgtgcttgctcgttagtcaaattacatccttcccaggagaacgtatcagttcaatcctcgtaccgctttgacagatgggaagacaggtaaacctagatgttcgccttcgaccccaggcttgacgcctcccacgatcttagtgccccattcaagagactccttggcattggcagtcgcctgtcttcctgtgcggagattagcattccatggacattcattgcgggactcggctcaattataacaaacggggataattacctgtaaatccctggtataataccttggtatgggcgccaatcttgaggttcggtaaagtgtccgcataactggccgtgcggggggtggttgtaaagcgccttattagggatgtccgcaactggggcgcccgtttatgtacggcgtgcagaggcataacgttcatggaatacacatgcagattggcgcaatgcttctatagtcggaggaagattatatacaatgtcaacttcgaaatcaatcaagtcaagaaaggctactgagccaagtcggctataatccggtgtcggagctttccccacatttgccgaggaagttggccctttcaagcttttttatacttcgcgtcttcgcacatgagatggatatggggtaaatataaattcatacgtcgttttcgtctgattgaactacctagatacgactcctttctccaatcctgcacaatcaataatcattaagatgaagcttcttccccacaaatctccgcctaacagatttctccccgcgttgttcccgctccgcactgagacccttgagcgcatggagaagcataccagcatcgaagaaaccatctagtaagatataagttagcaaagagtcgcaatataagaaccagcaaccaatggtgcaaaagaggtaaaaacttacatcctcccataccatcatcctccatatagctactctcagcggcagaagtaggagtctcaacacccccacctcttacaagtcgaccgcgacgattcgtctccgcctgcaagctctctgcaaacgcctcggtctctctcgcccgactagtacgcggactcgtcgccttgcgattggtcgcgcgcagcaacttccgaatctcaaacagatacgtctcgagcgtgtgcatgagacgcgacgtctgtctgtgcttggagctcgcgcagatcgagatcgaatcgtccttgataatatagccaataccgaagccgtcggcggacgtagggccgaagccgaagtggcgcagacaagggtttccgcagttcgaggtcgacagtatagtggtattgatcttgtcccagccggcatcggcgaagattgcgggtgttggcgtcgttactgtgcggtagccgcgcgtgctgcttccctgtgaggagaaaccgtcgtctgaaggggaggaggaggagagcttcggtgattcaggacactggctttgggtttgggattgtgtttcgccagggctggagtacccgccagttgagctggtgtccgggaagagaccctcgtcgaaggagcgctgccagaggcagtagagggcgtagaggtgacggtccgggccctggccctttgaacagtccttggtggcggcgctgtgtttttggcatgcgatgcggagggcatcgaccttttgttcggcggcattctcgccccagaatgcggtgacaaagtctatgcattcgggacttacggtgcggatggcttctgtgcgtccgtgcaggaacatctttgtcatggctggttcgtaggtgttctcagctcggccgtagagaccgtagtaggcggcttggaaggccatctggatgaatgcatccggagagaagcccatcgaggtgatgaagttcttgccaaagcattcaaagtccaggacttggatttcgtgctggcagagcaggtcggatagatgtgattcggcgaagcggagcgcaatgttaagctcgggtgtcatgtcccattctaatttgcgcggtgtcgtgctgacatttccgaaactgtgtgggtcgcgcttcgcagggtcgggactgctggttgcccataggcttggggattgcccgttgatggtctttgcgaagcggaggatggtgtcggtgtacacgtcgctggcaaagcgtagcaccgtgtggccatccacaccggtatgctcgaaattgataccagcactgccgttcttgcagacgatgatttgcagcttgtcataccaacggttggtacaggttccaacctgcacacccttgacgacttcgcatgtgccacaaagcatgttagtacaaagatcggccatggaggctggctccgtggcgtctagacatagaatgaagagcgcggtatcgacaatgttcaaacactccgcgttgttagatctgcgatctttggtcatgatatcacgtaggcccgaccaaactttccggttctcggtgctgagtacacccacagcacccttggcagcctcgtgaagaggagtctgagtcgcatcctcaacgattacctccaggttaagcgagatgtctttctcactcatgatcaaatcgctattgtcgtccaagacgtcaaaccagtagaactggccccgagccataacaactatgtgtttagccgtggggtcctggctaattacgcagccattttcggtaggcagacgtgcggttccaaaaagccgggagtactgatacatgcaaaggggcgttccccgcacggtatcaggaggcaactcctctcgacgcacagcccgaacaaacgccaatgatgagacggccagtgatgcagctcgagtcacctggtgatttctggcgggagttgggtcgtcctccaaaaggaagaatggattgaggtttaaaacaacagctgcgaatgttagatgactgcaaaaaattcttcacaggaaatccaacttacgattatcgaaattcaaataagaatcataccctagaaaatgatcagccaacatctcatccaatacttattctgaagacttacagaattgctcaatatagctcgtctttgaactagcataagccttcagccgctcttgcagaatagggccctcattctttaaaaagtcccgaacagcagccttggtatcttcatgatcacgcggggtttgcaagccctgcagagtctctaggtacctgcgacaggtattctccagatcaggaataggaagtttgggcagcgagtcctggtttgcaaaagtcaagccctggctcttgggctcagcaatctccgcggagggttgttcagaagagatatttgctctcatgactgtctggccctgggagtcaggcccggacttcttgcttttgccggtgtccatagaatcactggatggtttggggtcggcgtccgtaggatcaccaagtggtttgggatcggtgtccaaagaatcaccaagcggtttgggggctgtgaagaatcggactgccattgaggagtaagacataatgttagatgtgttcagattctcggaagataaaatcaggcgtagcgactagcgaggaaagtgggaattgacaggaggcgtaaggctgtgcggtagaagtagtggcagtcttggaggcagtaagatggcattggaactatgtcatgcgcagaacagatgcgggcaagggacaagaggacaaggagaagatcacgtagagggggagagattcaagtggcgagggagagggagagagtctggtaattttatataggcgtgcgggattatagaatcatctcgacgggctgtggatccacctcgggcctaaggggaaaaggaaaagaaacaccgactgagccatgtacttacagagcaatgtacgatagtgcaaatggtctgaaaccgaaatgcgggtttgtgtgaccgggtaatacggagggagagcggaatgatagcgccggagaaacggatgagttttctgctacgccgccagatgttaaattattgccaagaaaaggaccactgtggacaagtaggttatgggtgctacagagtccctttatatgggagactctgagagtttgtcccatgtagacatcgcatcttgaggcgtttccatggaggacggcgggtgagataggtttgtcttggggaggatacccctcaccccgtgggggaattcaaggggaaatgataggtgggatgcgggatagaccaggctaagaacttacttcccaaggttaatgtcaatcacgaaccctgcacgtcggcgcaggtgtctcggctcgggattaaagatgtacaaagcgtgccgttgagggtgagaggtttaaggtgaatagtgcttcaataaagataaaatgaattatcggcaagaagaagttcacttataccgccacagttcctcggacttttgaagtataccgaaagcgctcttttcttcatgtaccaatgacgtttcgggcgaagggaccggtcatgcgggggagtgggggtcacgtggacactacgtcatggggctaaaaagatcatcccagcgcatccaaaaggacatacaagagaacatacaacatacaagagaacatacaacatacaagagaaaattgggaaatcttacaatttcgtggatgggcatgttggaataacttcatgatacgctggggttgtacacagtacatcacgctcgaaaaataaaaagatgacgccagagattttgttatccacaggatgagccgcgacacaggagtggcggaagacaaggagtccaaaaatattcacaatggaacaataatatctgcattgccatgggtcctccaaaatagaaggacgaagcacgcttgcatacatacagtatgggtcaccgatcgaggcaggacatgcaaatgacgaagaaggtaaagacaagaagataaatacacaacacaaatcgaataggagacatattgttccgaagaacaggatggatttagatcaccacataagaatatcagatgtggcattctcaaatcaacacctccatatattccgagacgtttatgaagtgggcttcaagacgttgtcggcatactcgccggcgtagttaccaggggagccatagttgcagacagtgtaaggcgcggcgctgccaacattgcccaagtcagagcagctgacggtggcgcaaccaacttgagtggtagctttccagacgatctgagtgaagtggccccacttctcgaagttggtcatatcagggttggcctcaccgtagaggttggcgaagtatggcgcctcatcggtgtacatcattccgctgataatcttctcaccgacctctgccgcgtcgtaaccgtaggcgatgttctggccgtagtctccgctggcggacacgatggaactagtcacgttaggattattgtttctcaagcaaaacagaggaatacttacgtgtcgtgtccgtacacgcaacgagaggcgagggtgttggcagctccggcgaggtcatcggaccaggtcagatcgcctacagagtgcgcgctacggtggatgttgtggtagtacagaatggactcctggtaggagtcggtagagctggaggtggcagcagcggcggtggtcgaggttgccgaagaggtcgcgacggaggtggtagcagcggcggtggtggtcggggcgacggtggccggggcttccgaagaggtagcgacggaggtagccgaggaggtcacggccacgatttcagcctcagtagtcgaagatgggacgatcgaagaggtggtcgaagacgaggttgagctggtcgcgctactgggttccacagcctcaaccccggcggcagtagtagtcgaagccgcagcaggggcagactcgacctccttcctggaaacatcgacagtggggtgggcggcgttggcggtcttggtggactgcttgaccaaaacagcagtgttgagggtgctggtgctggtgggccactgggtgatggtttcggtgacggtggtggtagtccactgggtcacgtaaacctccttctcaataactctggcacaagtgccgaccgccaaggcggcaacgatgacagcagaacgcattgtaggatttcagacaaagaaacttctccaggaagtttgttaaaaaaaaataagggtcgggattgggtcaagcagatcgactgttgacaaaggagtgtgtaggtagaaaataaatgaatggcaggccgaggagcaccttctttcttcaaagagtgaaagaaagatcagatgcaggcttgagggattggatggagagaagagagaagaagcgaggaggttaaagtggtaaataatgtagaagggggagatgggagatgaggaggggggccgtgcgaatattaaatttaaatgaagtcctggagatggagattgaacttgtaagtgattattttataaattattatatcgtcaagaaaacgtcaatggctttctcctatacttattcccttttcttgggctttccaacctcttgagattcaaacatgcctcgatgtggcacattctatagtacattccacggcctagataccatttcacacagatatgaggctggcgatttagacctccaagagatattctccgtacaacataatctcgtttgaagtattaagggtatgagcatattaaaaattaaaattaagaattagggatatacgatgcgtgatgtgtcccctggaagtatggcctggaccacctctacaacaagtccaccgtatggagcccgtagtcagtactgctaatcagaagaagccctgagaaacaaggtaattaaaagtaccgtgggtttccactccatggaaaatctccgaagtaaactagaaacggagtctacagccgtgaaaaataagggcaagatcttagtatcgcaggcgacagccaacactggaagcccctggccaggaacggtttcaagtgtccacatcggagctttcaccaccaatcagaggaacgtgtcgagaaacaaacaaccccaccagaacacccgcttctcccactaagaaacttggcttggaggccaattcggcagtgagcacgggcggatctgacttagattaaagcaatcaacctcgtttcagccactcaattatgacgagaaggatcgcccgagacactccggagcaaaatgggaattccttgtttttgattatatgtccaagttggagggcatctgtgtagcttttgatattccgaggttccaggccgatggagcactccgttccttggatctgcgacaagtggaagatcatgcgacagccaatcagagcgatatgcccgttggcacacctcgtccacggatccttgtgggactgggcgcgtatacatacaggaaggggaaattccaaaacatcgtattttcaaatctgtacaatcgcatttggccttgtaggagtacggagtagaccactacagaatattccgcagattctagtcttgaacatgtacctccacctttccggcagcagggtccatagtctgaaagtacagaacatccgctctgaaataacgtaaattgtaaaacgtgcaagagttacccaaccaaatgtccaaaaacgccacacaacactcctgatgtaattcaaaaaagtaagtaccaaactcgtagcgctcgctagagatttttagtttggcatttcccagtctcacaaatcatcatgtagttcttggctggctcgccggccttcaaatcttggaagagagcatttcgggatttgagccagaaggacaggtttcccacaaagtctttcagatgtgaggggcgaatgtcgacaagcgaagtgaccacgacagacgaggacacggccacgccggcctcggcccggacacgtcgctggatcaggtcgagtgctgacacgggctcatcgttccgactgaggaaattgtcgccacgtggcttagggaccgaagagacatcgggcgtggagaacacacccgtcactgtgcgagtgccaatctggaggcccacaatcacgtccagcatgcctacaaacaggaaggggtgctggatgatctccaccgcgaaggtgttgcacgtctgccgagccagggtccggtaactctcatccgcgagaagagcggacaggcgcagtagattacgcgcaatgactccgttgatcgaaggtgttgctgactcggtgccagttttgagacggaggatcggggcaggcatgccaggggtgacgacggaaggtgtactgaagtatccggtagctgtagagccactctcatccaagaagtattcattgaggtatcctagaatcacaagttagccacaaggtcccgttcatagaaatggggctattctcactttgcaatcgctccgcaaattgaagatagctgtcgtcgtaagtagcctcatacatatcaagcaatccgctagccaagtatgcgtagtcgtcggcaaaacccggggtgtctccacgacttccatcgcggtaaatgcgccatagctgtcccgtgcctttatcgaagagcttgtccttgatgaaactgattgcccgtgctgccgcttcgcgacaatgcacggccttggagctctcgatctcctcaaacagaacactacacttggcaagcgcaccgatcgccaatccattccaggccacaataatcttgtcatccaggtctggccgcccgcgtgttcgttcgcgataatcgtgcaacttcagctttgacgacttgatgatcttcactacttcttcctcgctaagaccgaagtctctagcgagtttgctcggcgtggcacggacggacaacacgttctggttcatgaactcatcgtgagggtcatactcggggggcacgttgccgtcagggagaacaccccagtgtttggcgcagactggagcatcccgagggccgaggactgaggtgagttccttcagcgaccagacataaaaggcaccctctcgcttttcggtgtcatttggatgggggtaactgtcggcatcttccgaggaaaagaaccctccggtgggcgactgtatcggggcgctcgtcaagtaggcggacaaatcatagacagcgcctaaaagttcggggtcgtgagtaagccggaaagcatccacgtagacatccaacagctgtgcctggtcatacagcatcttctcgaaatgagggagaccccagtccatcgtcacgctgtaccgtgcgaatccatggccgatatggtccctaatgccgccacgagccatgttcactagcgtcgtgacagccatcgcggttgcttgttcacactcatcatgccctacaacatccgtgacctgggtcggataggcaccgagccggattaggaagctgaggttagagggtgtaggaaatttcggtgcgcggccaaagccgccattgaccgagtcgtatcgagaggcgaaatgctgatacgcttcttctagaagctcaatatccatttcctcgtcattatcattatcgcggtcaccatgtgtcccttcctcggcaaactctttcaactgcttggtgatttctttggcgctgtcgagacaacgctgctgttgtgtctgccacacatctctcaatttttctaaaatctccacaaacccgattgcctcggggcccgtgaatgtgtttgaatttgggccttgccagtaagtgccaccaaacacgggctcaaggttaggagtcaaaaacacattcaagggccagccaccagaacccgtcgtggcctggacataattcatgtaaacgtcgtcgatgtctggtcgctcttcgcgatcaaccttgatcgggacgaaggattcgttcagaatcgaggccacctctggtgacataaacgattctctttccatgacatggcaccctaggcaatattagaatgccggtacgcccagtgaaatagttgtaacctacaatgacatgcggagtaaccgatactgagaaagattaaacgattgtgcttcttggcaagctccatagcttttgcatcccagacttgccatgctaccgggttgttcatatgtcctcggacctgttattccatgagcgtgttgccatttatctcataggaacacatctctcacatagggggatttgctttgctgcagacgattgaccattttggagcttgtgtcaggtacgtcatggcgcgggtgtgagtggttgatcgaggcagccattgtcactggatttccaatacttctgctgatcggagactagacgtccatcagcccggggctgaatagtggttattaacgggttctggcagtacctaggtacccaagtttagaagctacccaacgtgggatcgagtcctgatgggatataacggcttgtggcacaaatagtatcttttaaactagggtgagaaatgggccgggttggcgcgggttagagcaggtcggagcgtgtcttgatggataaagtcgtgtgcgggcgcgccatttaggcgggggagtcgaggcaagggtcgcggtcgcgggagatcggccccgtgcgtcatggctgcatcagcaagtcacgtgatctggttgtatagtctacaacatatgtacatgtttagtgtactgtttggtgtggtatttaaggcaccatacatgtctctgctaagtatacatatgttcaaaacataattgggtatcacatcatctaatcgtctcccattagctctgccaactctgcctcttcctctgccgttagcatggattcggctggtttttcctcttcctctttgtctgctgcgggcttctttgcgagttccacggcctgctgaagctcatcgggtcgaagggaccattggcgaatggtcgcatcaattcctacgctgacaatggttgaacctacaagcacaagcccagtgacctcttcgaagtggccagagaaagtatgatgcagtgctccggtctatattaatcagcacatacgcataaaaaaaccaaggaggaaagaggtccttaccgatcggttccacactctaacttcctcgtcccgacaggcagtcacaacccagcctcctgcttcatagacaacaacatcacggacaaagtcaggatgctctagggtcagattggccttccagccatcctctcgaatcaagcatttggcagtcttgtcagccgaagcagtccagagatcaccgtcattatcgaaaaagagcttgtagacactggtctcatgtggaaggagagggtcagtagtatcaccaccgccaaagatactgaattggcgaatctcccggtcacttcctgcactaaatacgattggtttggtgctatccgattctgggtcaagggcaaggtcctggatgctgcgagagtggcccttgaaggtctctaaccgctctccacttgtgatattgaacaccaggacttgtgcatcagcaccaccggagatgagcaggtcctttccaagtaaccttgcacttatgactgattgaacaaagtcgacatggccttcgtacttctgacgtggttggcccgtggccgtatcccagctccagatagcttggtcccagcacccggcaaataggagcttgccatcggggctcaaacaaagacaagtaacaggagccatgggacctgtaaataccttagctgtttcgcctgtctgtagaaatgtaagaatttgcgacggttttgagataacaggtgcacttacggcaaggatgacccttctcacagtgccactgctttgcgcaacataaatcgagccagtatgccagggatctggatgaactgctaggatcttgccctgcagtcgaatagggtttccattggtgttctgagacttggcatctttccgctcctgctcatccaaagacgcgctgtgagggacgtcaatcaacacattccgattcaaagatcaaacaattgctttgactcacgatgtctgaaagaaatgatcccggttcgaagaggtcgtcatcgtgtctccagtctctcaaaaattcaggcaaacgtaacagcagctctcatttttccccatcaacttctcccccgccaacttcaaaattgctatccgagcttacgtcgtccaccgtagcccgtatcctccacaaaaccacagaatttgcgtttcctctcccttcccttctcttcccaacctatctcgtctctccaaatctatccgttttcgtattctttctcttcgtatccctcgtttacttagtccgcgcgatatcgcgcacagctgccatggaaatgaatcacctcatagggtcagtctgaaccggttcggagtcaaggtggccgggagttaacatttggcagtcagcgtttcaacctgatctcgaaaagtgacattcggtgagtttatcagactgtcaattgtcttctccgccattaattgtcttttagttatgtcggtactcttcacgaaatcaaccccgaagcctccacgatagctcttgagaatgtcatgtcattcggttcagaagggcgccgcggcaaccccgccgaggaagttcccccctccaccagtgtttacgagtacatcgtctttcgaggaagtgatgtgaaggacatcagcattgctggggaggatcaaaaggagcccgcaccgcaagaagcacctcgggtacccgatgaccctgccattctcggggtaagtcatcacagctctttccttgatctacaacgtcatcccccacaacccaccgcacattgtctcggcgaattgatcaagtgacgagaaattctcggatgtaaacacatatctgtctgaatgcgcaaaaccatgttgagatttccgttgccttccttctgatgatcaattccccttggacttgttttctgtatcgttttgtatacagcgtgctgactagcacaaatagggcgcgaaacgaccagttcctacccaagggcctgacccgggacttgctccacagactcttcctccccagggccctccccagctgccccagggagctggcccaagccctcccggttaccccccgcagcaccaattccagcaaggtttctaccccccctacggacagcgatttggaccacctcctccgttccctcccggtcccggtttccccccgtatggtgctcctcccggatggtacccgcctccggggcatggattcccccccggtcctggtcaattccagccgccgatgcccattggccctggtcagcaacctggacctccacagcttggacctcagcagcatggttctcagcgcccgggacctcccggtgccgcacccgcatctaagcctacatctgaactcccgatcggggacaagcttcccagcaagtctacgagcggtaacgcaaccccagccgctcagaacgcccccactcctccaaacgactcgaagcctagtgtggccgaagctttgcaggttcctgttagtgctgctcctgtccctcagaagaatggccgagttatgccagctatcccaatcgctgccccaaggcctgctcctccgatcgccaacattcctatcgccgctcggggaaataaccagtctatcactgatgccaccgcggctgccaccgctgccgttgctgccgccatggccaagttgcctcagcctggtgctcaaaagcaaccaggacaggccgaaggtgccgtggatgcgcttacgcagcagatgaatcacatgcgcccttacgacaacacccgtcctccccgaggtggtcaccaccaccctcgcggtggtcgcggcggcgcgcgtcctccgcagcagagcaagaaaatcgaagtcccccaatcggattacgatttccaaactgcaaacgccaagttcaacaagcaggatttggtgaaggaggccattgccactggagttcccgttgctgaagccgaggtccatgcagccgaggaggcagaatccatggaaactatgtcaaacggcggcggctcttcggcccacggctacaaccgcggttcttcctttttcgacaatatctcaagtgaggctcgcgatcgtgaggagaacaccactcgtgttggtggtcgtgagtggcgcggcgaggaggagaaacgcaatatggaaaccttcggacagggtagtgttgatggctaccggcccaactaccgcgggcgcggccgnnnnnnnnnnnnnnnnnnnnnnnnnnnnnnnnnnnnnnnnnnnnnnnnnnnnnnnnnnnnnnnnnnnnnnnnnnnnnnnnnnnnnnnnnnnnnnnnnnnnnnnnnnnnnnnnnnnnnnnnnnnnnnnnnnnnnnnnnnnnagggtagtgttgatggctaccggcccaactaccgcggtcgtggccgtggccgcggctttggtcgtggtcgaggtggttacagccgtggctacggccgtggccgcggtggccgggtcacctctgagtccactggtgtcccatcccagggttgatcgggatttttttgattacatgtctttctagcgatgattgctatcttgttttcatatttggggtggcaagacctatgaccgaaacgaataatcacacttgaatcttttctagtctcttcggcgcaaggcagactggggccgggggcatattgggttggccatgcgatcctgcaacagcaatgtttctttgtgtttctttgtgttttattgttatgttcctttttttttttttttttttttttccatctgccacgcataccctttctgcggcgtcttctgaaattcctggatccggtcgaatcttctctcatgttttcactgtgcagaaagtggcgaatgcaccatgatatctcgtgctcgcccgcatggagcagagatcgttttttttttgtaaatcatctgggaggaaatttccccaatgacctaaatgaaaaggcaaaaaacgaggccgaatggccttccaatctgtttcttccttgtgtatctattctaaagcggtttaatccgcatctcatcgaggcctgagaccccagaaagtagcttaatccggtagtaagttgtatacatcaacatttccacacgtctgtgagcaccagaatttgtcatatctctctcattttgtacatatttatacatatcctggttgtgagctctcttctccgatcttgatacatcatatatcgcacttaccttgaactgaccgcttcttatagattgctaacccagagagcaaccttggaagagtacaccatccacactgagacagctccaatttcgaccattcaaagaacaattggaaaccttccgacattctctacccatgtcccttgcttccattatagattcgccccgccgccatgtgtgtaacacgtagatttcctgtccaggcagtcactgttcagagccggggtttcttgttccttcgttgtagacccaatatatatatctatcgtccatggcgtcccgcagtcttttccagactatctgttatatcaagttacatcaaagacaactccatgtcgtcttccactcaggttgccaacaagttaccctgggatcctaacagtaccaagttcccttcgcggaaagatcttccaaagcttccagatgcacctgatggcgccgcttgggtctggggcaatgatgatgaggtggatactgtcatttatgtcgatatgttctattttatgtcgctgatccatcagatgtataggtgggcagattaaatctcctgacgccgcagcgggtcaaggcatctgctgctgagattgatactggagagatggtgcgactggagtaagtcgagtgaactataagattgaactccgcttacaggtatgaatatcaagccttcctctcacagtacccgagaagccggcttttgaccgcgaggtcttgcagcataatatcaaaacgcttgttgatggcattgcctatgatgatacttatatcatgaacacccagagcgggacgcagtgggatgggttccggcatgtaagtgattataaccaccaaacgaaaccttggtctaatacgtccatagttcgcccacattgacagcaagtgcttctacaatggggtatgcaccgaactcgattttccatctcccggaactaatccatcaacacccagaccaaaagcagtgactttgtaggcgacactgtaaacctccgctgcagcatccaccattgggcaatgcacggaattgccggtcgaggaatcctccttgactactaccactacgcgaaaacacataacaagccctacgacccctatacaacacacagcatcaccctatcagagctacaagcatgcgcgatctcacaaggcttagatctacgcccaaagtccgaaggcggcgacatccgcatcggagacattctactcgtacgctccggcttcgtggagcggtactacgagctcaatcctgagcagagatatgcagctgcgacacgctcccacgatgacctgtgctttgcgggactctcgcgcgagtccgctatccgggactggctgcatgattgttattttgcggccgtggcgggcgattcgccgacgtttgagtcgtggcctgttcctgaacatgactatttgcatcagagcttgctggcgctatgggggtgtcctataggggagatgtgggatttggaattgctcgctgagaaatgtcgggccagggggaagtggtctttctttatgactagtgctccggccaatatgcctggtatgtattttgcttgtgggccttgcggctgggtttatgttgggtgtatgagctatgctaactaacgggttgataggtggagttggttcccatgcgaatgccaccgctattctttaggggttttgcggtgtatcgagggtgttaattagtggttgtcaatgcaacgcgacgctacttcgaaccagcttctctattcagctgttgaagacgaactatctatgacaagtctacagtatggaatataatcatccatatcaggtacagcgtcatacataaaagattcatacgaatcatctacctaaaactactaaaaagactaccatcatgtcgtcctcaacgacagaggcagccgactgttcttgttaaagtatacgataatgggcataacgaaacccagcaccctacggtttgtcacttgccaatctttcataagcagtggccagaatatacggcctcataatttcactactgattataactgggacagcattctacatacacacaggagcaggttatttcctaatcttgccccatgacattgttatttcttttcttcctcctttgccgacttccaccctccccctattgctttcgagcggcctgtgtaggcttttgccctatgacaagatagaaatatgaataaagccgcagatccttttgttgtaattcctcctgcacccgactaatcagggcatcagtgtcttcctttgaccagcccaatgtcctggtgaatagacggagcgtatatccttccagcgcgcactgcatctggtacacatagaaactcccaattcttttcagatttaggtcgtcactccacttgccaaagggaacctagttgcaggcactccaaattcagccgcttaggctacaatacgcacaatgattatctttgatttttgttccattttaggctcacctaccttgaatatctgttcatcgacttgcacaaagccagctgagtgcatcagctccttctgctcgactgctacgttgattcgcttgtcaaacttggtcgccgcctcgtgtatcagcgcctcccactcccttagtgccactagccgggcttcatcctgtgcgttatcggtaaagaagtgcaagtcattctcccacacttctaaccaccccccggggagaagatgccggaacgcgttagcgtaggacctatcatagtcggtaatcatcccgcctagcgactgcgcatgaatcagatgaaacgcctgttttgtagtgaacggccaatcgccctcaagctcgtggcgttcaagatacgggagatttggagacatatcggtcaggtccatacccgttaagcgcggggcaggacgatgctggtccagcgccatgatcgtccaggagccgctacgggtagcgaactcgagaaacttatggtttttcttggccggatctaggggggcaataaaggttctgccgtctagaagatgccagatggtgctgatcatcgcgtgtgctgtggtagcgttttcgtcgtctggaaaggggaattcgggcttgaagccataatagcggcgtccattttcgtatgtgtggttattgcgtgcagtcagccagttcgattccatttttcttcggtcagctacctttccttttctcgtgggtagagatcgggggagtagtagtttatatatactcctctctgctacagtgaagagcaacacatagattgtcccagtcgatttctaacggtcttgagtcatcaggcgtcttgagatctgaatcccacgattttgcgggccttggagttgtggggtgtgggggacgctagtgggcggtctaatggcctggcaggtcttgagacggcggaatccggggttgtcgtttcttgtttccttcaaaggtgaaatttcatcttccggtctttcgcaaggcaccagattatcagttccaccatgagcacccagacgcaaatagagacaatcgtgctacagacaagagcttccaccgaaacaatcccagccgagaatgaaacattccaagactcaagatcccccgaaccaaaatggatgtatgccaaaatcctcagcgcggggttgtccttcttcgtcgcgggggtcaacgatggaagtctaggatcgatcattccctacgtgatacgcacctacgatatcggaacaaacatggtagccgtcctgtaagtacgaagcgcagaccaaggatatccatctgcaatacaacactaacatatccagatatggcacaaccttcttcggctggctagtcgctgccctaagcaacggcaaaataacccaatacctagacctaggcccaattctgagcctaggcgccaccatccaagtcctagcccaagttctgcgcgtctgggaacccccattcgcactgtacgtggtaacattcttcctcgccagcttgggtcaagcatacaacgacacacacgctaataccttcgtctcggcgctgagcggcgcgcaccgctggcttggctttatccacgctatgtacatggccgggtgtttggttggccctttcgtagcgacgggcgtggcgtccgctaatgtcgattcgaagtggtatctgttctatcttttcccgcttggcgtgggtgtggtgaatcttgcgtttgtgggtgtttcgttccgggatcgtatggctacgccgactgtcttgaggagtgagcgaggaggtagaattgcttcgaattctgcgctcaaggagatcaaggatacgctttctacccctggggtttggctgctgagtttgttcttttttttctttcttggggctactatcaccgctggaggtttgtcttctcttgcttgcttctctgcgtgttctgtgttctgtaaaactgattgtatcaggctggatggtcgagtaccttgtcaacgtccgcaacggcgacgtcaaagcaatgggttatatcccagccggcttctacggcggcgcctttctaggacgtcttatcctcgctgagcctacgcatagactcggcgagcgacgaatgatctttttttacgctttgctatgtgtgggtttgcagttggtattctggctgtgagtttggcactcctctatgatatatttctaccaaccccgatatactgcattgtctgtactaatcctggtggtttaccagcgtcccgaatatcatcaccgaggcagtagcagtcagtctattgggattcttctctggtcctttcttcgcaacagtaagtgtttatcactgaattttcctgatcccaccctaacatctagcttagggtatatcggtcggctcaaagatcttctcgccacagatccgctcttcggcaatcggtaagcgaacagccttgcccattattcgcgggggtttactaataatccattaagcattcgtcttcgtcctcggtcaaatcggtggatcggtctttcccgctttgacgggaattatcgcgggacaggttggtgtccaggtcctgcagcctatgcttgttgggttgctaggtgccgctggtgtgagctggttaatcttgcctaaggatactgcgttgcatcaagattgaggggattataaaatgagcttcgtggtattcggcgggggtgaacaggacagctttcaaagattaaacaaaccaaggaactagggtataaacattcattacttcgttacatcacgacgaccaatagtgccagaagccagaatcatcaaccagaaagaaacccaatgagatacacacattcccacaattataaagaccaattactcaacataagaaaccccataagcatcattcctcataaggaaataaatggaacccaaagcccttagaagatatcatcgggccattggtaatcctcaaggccagaaatcatagaacccacagtagaaggtgacgtagaaaacacaggggcagacacaggtctctttttggctggcttattcactttgactttgactttggcagcactcgagcgaagttcttcagggaggggcggtacgggaggaatatcatcgtcacggggatatccagatcgtctccgactaggacttgtcttcgaccgcgtcggggtgtgagggctacgatcagggttgagctggcgttgtgggtggtgatagaaggcttcacggtgggagtcacttggcggagcaggaagaggcgtagaccagatggtggagcgggaatcgtcgtccgagacagcggcaggcgaagataccgggcgcagactgggctgactcttcttcatgcggataggggttgtgggcttggaacttggtgagcgggtggttccggggacttttcggggttgaacgtagggagaccttttgatgttgctcgtggcacttgtatttcctcctgcattactttcttcggtttcggtcgagggggctgcgtggttgatggcttgcttgcgcttggccgatccagggctctcgccggcctcggatttcggccatttcggttttccggatggactcagtagaccggagtcaatcagcatggcgagatcggggtcgtcgatgcccttcttcggacagggctgaggagggctcccactatcgatagattcaggaatggaagacttccgtttacgggagcggtccttacccattgacgccggctgtgtcccttttgagcgccattttggactttgagctttagccgggctttgaggggatcttggttcttcgaaggagaaattttcacggtcttcaatggatgacagggccgtcagattggccgcttcagatccagacgccttgttttctgcggcttgttgatccagaagcctttcagacggtagagagggaagggcaccagggacgaacttccttgggaacaatgcgggatccatctcggcattgggaatatttgcttgggctgtaggtactggggcccgctcctcgttgcctgtgagttcacgaagctcccgccgggcacgttgcagtttctcctcgaggttgctaactttcttgagcagcttggtttggcgcgagagttccctgcgggagggttgcttgcgcagtccagtcggctcgtattcatcggaagttctatcgcaatacactgccggggaagcagatggggatttgaagaatgacttcgtcaggcgaagatcttgaagggaggagcgtttggaagctgaagactcagaacgtgatggcgcaccacggttttcttcaattgggtggtgatacgggtctttgactggagagctgtattccatcttgtgctggatcgaccgccaagtctggtcggcgagagcagtgttgacaccaagatcctcagtgtaatgacccttattggttccctggtagccagccttctttaattccgcataggccttctccgcctggctgatgacatccttctgcggtgacttattcggcgatccctcagagtttctgccccatccaccgaagggattaaatgccgaggcaatagccttcccaaaacgaaaaatcccagatgagcggtgctgaatgccagcctgtttgttttcctggaggtagatactgggtggcttttcgctgacactatcactcatagtcgcttcaatgaatcgcgatgtccgtcctctggggcggcgcgggctggaagcagatgccgcggcatgacgagcgcgcagcgaagccagcgagccacgaggtgaagcgcggggcgaaaccttgtagcctgcgccattcgcgctcacgttgagactcccgttttcaccgcgttgggtgcggcgctcatgggatccgtaatcagcggcttcttcgggcaacggccagtcgttcgagcgacgtcgtttgctcagcttcgctgccggcgatcggtggccgtctgcatctgcttgcgcctcttcggcatcgtcgaattgtccagagatatctgagctccaatccgagtcatcgtcgtcgctggatcgtaggtgcttgcgggaggagcgctggtgtgcggggcttgggtcgatgtctatctccatttccattttggagtcgcgggcgctgaaatgacgcagggaggttagattcggtctgtcttatgcgggctttgagcttcctttaagttggattatgagaagggaccttacctttgcagcttgcgttatccttttttccccacgcccttggaaagatgtcgcaaaagtctgtcagaagttggcatagaaatggagtcgagtgctgagagggaagaaataaaggtaagaaatgaggatcgaaatgaagatctcgggagactcgagcaaaggtgatgcgccggtttgtttacatactccgcacttgccaagggggaggtttgttgtggtacctggtacctgtgtctacccctaatctatcgcaatccacaaagtacccaatacttcaagaatgtcccatatccccaaaacaaacactacaaatatgtatatctgtatgaactcgatgctatgtagaattccgcgtgtctcagacatgtgtatgttcgataggaatgtagatatgatatgtcacttagagatatgtatagttaggacagataacgcttgctaaataatggatgcacatgcattctgatgaattggtgcaattcgtagattgaagtaaaaagaacgtcagaatgctaaatgtaggtataaggagatgctacaacaccagtataaagagtagattcaccagatgtgaagtataaaacccatgagaccagcccttgtctgtccggaaagagtatgttccaagagcaatgttgaagaaaatcccagctacagtgagataagagtgacattccctgttccgatcccatcggatgaaaggaacgaggcgcgttgctcttgatgatatagtgaggtaattcgcgaatgatcattgccgctgagagtaagaagagccagctgcccttcctatgcaactccgaattttggccaaacaaatgtctcgcaaagtagtggaacatgaaagaggaaaccagttccccaagagatgagtccaaatgcataaataaatctagggctcgagtagcctcaatgaggaaccagaagataagttatatacaaaaaaaatgcaatcggacccattgacgggttcaagactcgtcgaggcaagcccaaggaaagtatatcgtgttcagccaatatggcaagatattttgaactcattttagatcttattaactcgatggaggagctttcatgaccattttgccgttggcacgcttgtacgccaactcaatgcccatttccgccataagtgcagcgcgactttctcctgagaaatcgcgataacccggataaggctcggtgtcaggccgcatgccattctgcattgatcgttcatcaaggccgaaagtatcttcatggctccttttgccgtaagttggcccagtttggtacaccatacgcttccccctaacgttgtcatacccaccgccgctaccgccgggtgaagtgctttccacagaaggaacaatgtggtttgcatattcatttggtaagggcttgagagacggggtggcctggaccaaggtcggtgtttgaggacgtgacaccggaatatgggacatgtattggtataaagctggttcagccatgcggggatccatgtatgaggtcgcttttggtggctccatgccataagaattcatacctgacatggagtaagctcctcgttccgagggtatttgaggtgccggatacgcaatgggcgttccttcgtattcggatgcattggatgggtgtcttatctgggcatatgcgttctgtggggagtagataccttgcgataccactggtgggggtgtaggaggcatgtgaggagccggataatgcgaaggcgtggagccaaatgaaaggtgtgattggtatgagggtgtttgagagtgtgtcatagggggtgcaggtggcatgggtctttggtagggttgcgggcactggaagccatagtcgggtgcagatggtcgtcgatctggaggaacgaacccgtagggcgattcgatattgctgccattgctgttcgacctagggcgatctatcgaagctgcgtatctgtcgggtgtcgcgaaacgatccgacgatcttgcatacgccgctgcgcgttcctcgccgaattcataatcctcatctcgcttgtcgccccggcgcctcattcgaacatcacgacgaatgcgaacacggcaaccctgctccgcaatgatacggctcagagatgtgctggtcgctaggccggggaatttcttagcgctataaacggtaaagggtaccgacttgacctcgagacggaaatgaagaaacgcgtgcggggtgcccggctttgctgcagcggaaagaggtatttggttgggaagaggcaaggcggaatccttgtcggtatccttggggtccttgatttcttcgtacaggtggaagcttaagcggtaccggccctcatggcgcactgacaggtctgggaagatgaaatagcctgcttgtgaagggcggtcgagatatgctaccccggcgactggcacaccagtcaatacagggcacgactgtggtccacccacccgcccgtgggccataggacgtgcggtgtcaagggttgcgtagaggaagaaattggcattgtaggcgaaggtgatatcggtcttttgtgcgtcgttagccgggtcggactcgaagatgcgtaactcaaccacaggcggtgggtcaacagggcgacggtcggctgatgctatttaggatggtcagtcaacgcgcggccctgatcaggctcaacggcaaatactgacactttgctcctgcgccgcatgctcttgcccgctctggttgttgcatcacgctcaatttgtatgtaagctgtttgccctcccgcgtgatccgggtgactgagtgctccgtctcattatgaggtgccatgatgggtggtctgttggccatttttgcggattgatattatcgttgctagatattctgccggtcgcaatatcagtaaatgtcgatcgcatggttgggggttcgtcctatgtcaatttttccatggagcgcaacatacaatccgtaatcaatggggccttggacgaggtggtttaaggtgggatatcgccttcttctcccccagttcctggcctcacatgagctgttggaaagacttccgaggttgcagtcaagccgataaaaccccccacatacaggaacagaacaaaaactagtccccgatgaattcgggaaaatgcacttcaaataaacaagtgatggaagagtagaggagaagagagggggcagagtgggaattggtgacactaacaagaccccgagccctgggccctctcagtatcaacagaagtacctgttcgatccgcagtggtccccgtaaaccccgtgtggttcccttaatttttttttttttctagtttctattgttctcgataatccctattattttggaagaaaaaacagacaccaaatagatatatactctaagcatgtcatatatgtgtgttacattcaaatctacgagagtcgtgtctttagggctttgaataatacttccaggtaattaataatcatcgaatttgatcccaaaaaaggcaaaatgactggtaaactatttatttctcgatttattttccatggaacgacctctccacgttacccggcgtctatattccgttccaaggttccggccgcaacccagtccaacggatcggagtctctttattttccctggtctccataacgtcctatgcttatattgtagtctacatcattctatggatgagcttgttcaaacaaatatggcggttttaaaagttccaggatcaatgttgattgatgagaatagattgcactgagggatttcaaataccgcgtattcccattacaggtctagtccccctgagaacatcgaccaatttagacattgattgttaatcgccaaaggacaatcgagctgaactccatcgaactaccgattccctctcacaacctggcttggctgaccccactaagccaatcagcaatgtctcgaatgagcagctagacggtttctggcagcaatccccaactgccagctgttcatccaatgcgcgtacagttctatgataaaattttgatctgcaaatcctcgttttcgctgaatccttggccatccctgtctattgcgggaactcggatgatcttctgatttgcctattatggcggataaatcatgcatacttttttccatttcctcttgcaaggcacgatttacagatttatggagaatggtcttgggaatggtctccagaatgtccaaagtacggagtacggagtacacatacgaagcacaatgtcccacctaggcaaatgttgaaagtcacgtcagctcaatcgaggagttattcctcggtattattccgtcaacagttatcggattccctgtcagtttgaacctaatatcgtaccatcacccctccctggtctgccacattgtatgtagacctgttcggtgattcatcccaactcataaacccaaaattgagaaagctccttcgtactgcatttgggggcctgcagatttagttcattacgtggtacaggatctaggaattccagaccgggccagttctaacggctcttttgatatgcacttatccttgttgtaatgtacggagtatgatacatggttattccgaaatagattcttgataactatggagtcctcgtacgaagtactccgtaatgatgtactagtatattcaattgcagatcgcccttgtattttgaaacccattggggccgatgcatccgtgccgaatgacaggcattgatatgatggagccctcctgcccaggtgccgtcccgaccaagacaatagtccaaacgcagagacaagtccagaatgctaccattatcacagccgctttgacaggcgctccgagccgagacagattacgagtttatgcacggagtatggagtacgaggtatagagtagcatgattcgtttaaaggggagcacttgcatatatctatatgcatgcgagaaagactcttaccgatacagataaatgtcattacatcatatactagagtcattgcacttgtccacatagcccattatttctctgcggtatctgtaacagcgctcttcacagacataggataaaatataatatgtatagaacaactgccgagaaagagcatgccaagcgctaacgaagttttcgcaatagtgtatccttctagaatatcgaagcgcgaaattatggcaatgttacctatgatcttcggggggctgggggaagccacactaacggctgaaatcattcaaggatcggaggtggataaggcggttgtatcaattgcgtacaaagtactccaaacggagtaccccgtaaagtcatattctcttagaactaccccattagaaactatcgtctatcatagattattgcccagtgggtgactgttcgcattgagctatggattcccaacccctgcaacatatcttagtggggttgaagctttgacaaagcttggaccgagtgtgtatgtatgtacaacagtacgtatggactacggagtaagaaacataaggaataaaatagatccaagagcgcatcacttgcaaaatacgtatggagtggacgatcctcagctccacaaggagatatgccgggtctagatgatatactagacttacactatcgcttggaatatcttggaataactaagttttgattgtcacttacaacatactccgtagttactggcgagtgggccgatgggattttgatcgactatttagagctgatgcagtactagtctctcatggcccgacttccccgaagccacattttatccacctgcctaatgcagaacaccaaaggtaccagcttgtattctgcattttatatatattgtagcagttcagctgtcatggctggttaactaggtaacaagagggaactttgatgaagcgtatatgttttgtgtataaataataaagtaatctcggcgatccagttcatccataagatctctcttgactcattctgtagttctccatactcgggggcgatcagctgggaaaccttacatatgtacggggttagtttgaactttgaggctgacatcagaatattgaggcggaaatgaacaacaactactagttctactttaggtatggggatgagtccgttggagtgatatcattcgaacctctgctaagcctcaaggactattacaatcaaggcattgctttgtatgcctaaaaataatcttactgcatgtgccttttcttgctgttgagcatccatgtaggcctcgtttgccttgttgccttaaagctctgaggctctatctagcataactagcgttatgcctgctattttagagaactatgggttcttctgctctctgtctttggttttccttgtgaggcctagtttacctcgcccctattcaaagctagtagggtcaaaaagagacaatattccatagattaacccaactgtcatcttgaagtagtcaagcaaaaacaaactgtgtgttaacaatcgcaaggtccttaacatatacgatgttcagtggactgtttcacaagttggatctattcttgactttccaacacaacaacattcaatccctagatcacaactcctgaaaacttcttaacaccaacatgaaaagtcctccagcatagtccgcccatacaacaggcggtataattctgccgaaaagtgaggttatattgaactttaaggatgtcccttcgcccttcggggcatatggtcaaatgaaaatatacagagaagattagcatggcccctgcactaaggatgacacgctcaatcaaagagaagctacctatttttttttcttttacaggtcctttttgaggttatacgggtgtgggtctttatgatgacatataattggtcctacgcttttaggaagtcacgtggtatatagtatccacgtcgaaggttcgaatcgaccaatggtagaatattattattccccgctgtgattggcttaggccttaacagtctagagtcgcaacatcaactcccatatcggctgcgcttcctatggatcttctattagtcttacctggatttgaaacaaagcacttcgcacatatcctacctcccctggagcgagctaaagtcaccaccgtcgacgtcatcactcttgactcactcgagatcgcgaaacgtgcccgtgtacctcccgcagatgttcgccggctctcctcctctattgtcgaggcattgcataccgatattggctttgaaaagccacatacaaacacagggaccagcgatgagcctagctctagtataaaccctgatgcggcgaggacactcagctcctcgacgaaacgcgcgttgcaatggaacactataagcacccttgaccccacgatggatgcactgctaggaggcgggattccaacggggtatgtcacagaaattacaggcgagaggtatgttgcaggtgctcatccatgtcttataaggacaggcaggtcaatctgacatgtggatcgatgtccagtggaagcggcaagacccagttccttctcagcctatgtctagccgtccagctacccaaaccacaggggctacgacggcgtgccatgtacatatcgacagaacatccattatctacgccccgactttcacagctcctagaatgccatcctgtcctctcagcactcccggccgagcaggcgccctcgctacagaatatactgtccgtcaacgccatggacctggagatgcaagatcatatcttgaatttccaacttcccgtcgcgatcgaacgttatgacatcggcctagtcatcatcgattcaataacatccaattaccgcgctgaacacgaatcgaacagcatgcaagccctcgccaagcgatcaaccgagctcgcaaaactaggccatctactgcgcaatctcgccgtaaaggaagacgtcgctatcgtgctctcgaaccaagtctacgaccgtttcgagcctataaaaagcagccagtcaaccccacgcgcagggtttccatccataccaagtcaaacggcaggacgtggatccggccctgcctcccccttcccgaagtctcgcactgaacagctagctactggaaatagccagcagccgccatcctctacccctgctatttcctcatcgccatatcacgcaccacatgataaatacttcgacggctcgtacctgattgctcctcgagcacacagtagcttgttgaacgtcgctcaccaggagcgcttccactctggctggggagatggcgcatacccggagactggaccactgaagaatccagccctaggactcgtctggtcaacgcagatcgcctgtcgaatcgcactgaaaaaggaagagtctttcactgtaggcgtttctatgggtgacgatgcatccacacaggaatctcaattccaagatggagtcaatggcaacacctctcgagacccggactcattagcaatgcctgctccctatcgcaagaaccaaatctctaattcgcagaactaccagcccaacccaggctctgaatccaccacacggaggactatgaaacttgtgttctcaccatggacggcagggccgaaggatacaccgagaaagggccaaccgaatagaagaaatggcgaggtagagtttgaaatctggaaaggtggcgtgagaagtacgtgtcgtggtgaatgatgcatatactataaacgactccattcgtgcccaaagcccaaagcttcagtgcgtcttggaaaggctcgactgtgatttactccagatactagtttgatatactatgttggtatgtcctcgtattggaataagcagtacacctctgtagtacggcggtttggccgagtggcacgggttgaatcctgttgccggctcgaaatatctaccaaccaactgtcctaccataacttctattttgctaaacttctcttaatttaattcggagatgccgaatatgtatctagaatataccgagcaaagaagagagagttagaatatcaaggtggaatatcgctgtagatgaccttctaattctcatgaatcataccacttgaccattggctctagtctttttgtatgcaaagaagaaagtgaaaaaggatgaaaacgcttcaaattaaccacaatcatatatatggacgtctctctaaattaacacatctctttctccccttttcaggttcctttcttctcccccccaacatcctccgacatgctcaaaccctcaccgcagaaacaagataatggatctaaggatcaaaggcaaagagatataatgtgaagacccgagaccacaacgacaatcacaagagaagaatcatgagcgtctcaaaaagagaaaaaaagaaaagcatcaaatttgacttatgacttccgcccaacttctcaagaaaaaaatcgtattgaccttgtgtatatccatccgaaagtatacacagtatacaaataaaacaaagctcaaatcaagtcggaacaatgcaagaggggagaaaaagaaacatcatcagaaccgaacaaaaggcattcaaggcatcaaggcaacatctattgagccttggccaccatcttggaaggaggaatgccgatgccgttgctgttacggtagaacatgacacccttgctctcgccaacggcaccctcggtgggctcaacccagtggcagacacgggcggcggtccacatggccttgaagaaaccagtccagccggtgtgggcctcagtgcggtagtggtcgcccatgacgcccttgatggcatcgctggcctcgtcggcgttgtagaaggggatgttgctgacatagtggtgcagcacgtgggtctcgatgataccgtggaagatgtggcggccgacgaagccgaagtcgcggtcgatggtagcggcagcgccgcgggcgaagttccacacttcaggctggtagtgagggagagtggggtcggtgtgctgaaggaatgtaatggcaactgaaaatattgttagcaaaagggatccgagagaaccgagatttgaaacttaccgagccagtggttcacccacaagtacgggagaccgtaccagaccaacaggttcaaccagccgaacttggagccgatgaagtacaaggcagtgcccgtaaggacaagacccaagtcactcaggacaatcagcttggcgtccttggcctcgtacagagggctggaggggctgaagtggttgacaccgccgccccagccgttgtacttgcccacaccgcggccctcgggctggcgggcgtggttgttgtggccggtaacgttgttgagcaggtacagaggccagccgaagagctgctgggccagaaggttggcggcagtcaagatgggagtctcctcgcaaagctcaccgagctcgtgcagggtcttgccgacgcgggtagcgtactgctcacgggtcttgggcacgaagaccatgtcgcgagccaggttaccagtggccttgtggtgcttgccgtgggagatcttccaggaaaagtagggcacaagcaggagggagtggcagatccagccaacagtgtcgttcagaaccttggagggagagaaggcctggtgaccgcactcgtgagccagaacccagacgccggtgccgaaaagaccctgtacgatggtgtacaaggtccagagggccacgcgggctggcatgaaggggaccgtctcgggggtgacatagttgtggaagagataaaagacggaggcaaggatggccagatcccggaagacatagtacaaacttgtggcggcggagcggtggaagcagtgagcgggaatggcatcgcggatctgcttgatggtgtagtctgggatcttgaactcgttaccgtaggtatcgatcatcttgctgacctcctgctccgaagccatggaagaaagggaggtagaggagggggactggcgagggctgtcaaagggcgaggccgaaacagagctggttgttgaggactctgtagcggggttgcgattgagcgcaacgcgcttggggattgcggtcgacgacatgttggatgaggttgacagtgttcaactccgaagtcacgatgggtatactcccaatgtgtccctactgaaatgaaacaaaggaccggggtttcaagacaagggatctgagattggattagttgagattcgtcaagttgagggcctggggtttactcacgatattttgagtttgggggagtgtagtcgcactagggacagaggttgaagcagatccaagcaagtgccccgttttgaaagagagccaacgagaaagcaggcaattgactagcagggaagaaaagaaagacacgggagaagagaagggatagctctctctttcaaagagaaacagaaaaagcgaaggggagaaatcgaaaaaaataaaagcgcatggaaccgtggggaggtaatttgcataccgccactctctgtggaaggccaatccaaccgtattgcgttttgaaaaatacaccccatctccactcccttcgccctcgacagctgagttttaacgcgaactggccagaagagtaagaatagggctgatcttgtcttgtctgtctattcacatgccgattccattactatgtatgtatgtatgttgtactccatcttcttacttcgatgcgctttctactctgtgtgttcttcatagccaccgcctttccaccagatcccgttcgccccaacgctttcgttattcgctgatgtgatctagacttccccggtgattgtacctctttcacatgccggcaatacgttgaaatccccaactatatgtgggcagatcggaccaacgtgcctcggtgtttgctgggggtttgctaggggtttgctgtacattggtttaggaacctcccatcgaatccgagctcccaccgaatccgagatgcactatcacatacggagtatattgtacgaagtactccgtatggggtagcaattggttttgctttttgcaactattgaaatgcaatatccagcccctgaaccccctacaatataggacagacatgagtgactgtctcttctgtgctccgtaagcccgcatgtacggagtaagcccccatcagagctggagatggactcggcagtggcatgcgcaagggacatgtgatccactttgggttttcgggtgtccgggtataatccggcgatgggctattatctgttctgttctgttcagatcaatccagtctggaaggaagaatagaatactaatctcgagaagctaactataaatcataaatctataaatactgtgtctacaaataagcatatccacgttaaagtagagtgcaaaatacgccctcgataccctcgatacatactccgttatatacaaatcgcctcttgttgggacccttcgggttttgttggggccccactccccctttttgaaaaatacgcaaacgttaatttttactttccgatgtttaattctttagcccctggggccatcacccgtggacaccaccttgccaccttagataagatctgatcgggcggggaccgaggcgccgatctcggacttttgtatattccagaagtgacggcctttcttctgtatgagttatttctatagttcatcaaaaaccaactcttcaatcggtatccagcttactcaagagggtacaagaagccataagtgggcctgcaaccccgtagaagcgacctaaaagaacatcgagttcagctagagattaggctaatccagattaggccacactagtctgtatcgggtcaagggccaacggaagcaagccactagaatatattaccgaggatagcaatggagtacggagtacgattgaagatttcccagaagaataatggattcatgaatcgtagatctaaatacaaacaagtacctcagctagctcatatacgactcattatacatatagttacccacacaccccgcacagacctaacgaacctcctccgtccgtcgctccgaatccacaagccaagatcccccaccagcagcgtgattaccgccagcggcactaagactcacggtcgtcttcttcaaatcagggagtacaagaaccgtctcactatggttacggtagtcaatctcacaagggatcgagcgacgagccggcgccatggaaccagccggatcggccgctgtcgggagctgcggagcggatggcaggaacgtacggatctcaatagccgggagaaggagatggcctggtttctgagggaggagtagaaccgtgaagcgtttggtttcgccgtcacgcgcgaggaaattgccccgccgccggccacctatttgccacaagtctggattgccgtgcacctcgtaggagcattcgaggggttggtcggcgttcccgcgggtcgcgggggaacaccagcggcgcgtgtggcggagacatagctcggcggtgatcatctggccgacggcggcgtgggcggagggccccggatcggtggtggctttgggctggagctggaggtcggctgtgtgcacgactgggatctcggggacgtcgacggggatgatgatgcggcgagtcgggatcgtgggttgtgcggggagctggatggtggagttattctgtttcatatgtgagtaacctcgctcgaaacactcgggttggttcttaccttgtgccattccttgagccactgtcgcacatcctcgccgggtgatttcaaagctccaagcagatcgtcccatcgcacagtctgatagggcagcatgtttacctccctaatcagcccaatggcttccatgtcattcgtggacagctgtgcgcggaaactgctgacaatgtgcgatgtaagcagcgatgcgtactggcagaatggactggagttgatagaagctgagaattgcttttcgactgcgtcgagacactcatcgtcgatacatgtgaagtcaacgctcagttgtaggctacgcggtgttgatgcgattgtgttgccttcattatggcggattttgtaaagaagagacgcgggctgcttggggaagacatcaagggcaacggggccggtgatgctgctttccacatcgtaaatgtctgagctaggtagactgcagttcatgatacgaagcgggatcagcatggccgggctaatggtgaagcgtgagaatagtatttcgtccttgaaaatgtcctgcacgttgaccgatataggtagcgtggaaacgacattaaatgacgccgaggaagcgaatcggccttgctcggtctcataaccaatctctgctcgcgcggagagggtcgaaaacgcctcctccacagtgtaggggatacgcagtcgaacgaatgactgcgcgggaaattccgcgaattcgataatgcccgactcgtggttggcatccacctcgagcgtgccctccacaacctccgtctctgcaaggcgaagccgtaggcctgcagtacccggccggacacggatcgtgccactcttgatatcgttgcgtccgctgtggagttccagctccaacgtccgcatggcctggaggttaatgatatgcggtgacacgatcttcgcccgtagggcttcggccggagggtaacaatagatataaggctggttgtcggtttcctccgaatcttccgtttctcggaagccaactggaagggtggagtcttgcccgccgttgaagttaaagacaagattgccagccctcatctcgagacggtcaatgaaatacttgccttgaagtgtagtctgcgtaaaagttagttacttgtagcgaaagttatcctacgagtgcttaccgagcagtcaatcaaaagctgtgttgttgatgatttcaccacgaacttggctgagctctcgatccaatgctcagaattctgagagctgttagcgctgaccagccgaaccttgagattgtcaatctcgatctgctgacccaagaggaatcgcaaagacagttggatctggaatccatccttgtcgtcgtacagtcgaatagctgggtcgacacggagttcgccaaagaagtccgtcaaggaagcagggatatccttttgaagagcaccagacgcttcaaacaaatcatggacatgtccttctaacatctcttgttcagtagatggaatcgtgccagccacggacttttgcctgactgacaattgcgcctgcgcatatgtagcaaatttagaaagcaaccgtatcatcatccggacatagtcctcgttccgtttgagctccttcaagcaccgcgcgtggagttctaacatgcttccttccagaataatccagtacttagagccgtagaagggagccatccgatggaaataggaagcagcagactcgtagtctttccggcggtatcgtatgatagcgatttcagccagggcctgttcgacggagttgacacggttggctgccatatgatggcggatcaaacggtctgtgagctcttcatagagaaacaggaaggcgtcttgcgactttaatgcggccttgaggccagaaagatgaatgcccgcaagcgacgattccttcttcttgggggtctgtgactcttcagtgtcatcgccatccaacgaaatctccgcgagttcacttgccccagaacgatagcgatcatcaaagagaagaccgaggttgttccagttttcagaccagccccgtctgcgagcaatctcctcgagagatcgccgagccagaagaagcaattccgccctcccggatgagagctgttcagaaccagtcttcagtgtgagaataggcgcggtcttggggtgttccatagtcgaccgccgctgaagcaaacccacactatcggagatatcctgggtcactggccggccaggttgggcaccaggtgatcctatgagggaactagagcggcgaggcacattggtacgggaatctgccaccgtggcagcagcggcttcggtcgattgcgtaacggcatgcagggaggattcggggagcatgagggtcggagtagaggtttgactcaggatctggaaagctgccgagaatgcccacgtggagactagattgttgataatatctgccttgtcatcatgaactacctccgccagaccgcattcgagatcatagcggagggtacgtgcagctaaactgatcaattccgttgctcttgcgcaaatctcagctagcagaataagattttcgggcttcttgcctgatttcgccgcgttaccccctgccgcaggttcgctgccggccagtgatggagctctcgcggctcggagtagtagagtcagttgacgagagaagatgtatgtacggaaatcgaagattgagatatcgctggccaaaatcatttctcggtatgacatcttgttggcgttaaatgggaaatcccccggttgaagctctgaaaagagagccgcttcatcttcaacgccgtcgctgtcatcggaaacttcggtctctaacgcctttttggccctctcgctccagcttttactggtgaccgagagtgcgccactgtgttgatcattactcccatcgagctggtctcgaatagccgcatccaagccaacagctagctcatcgtatcctgccaacgcatcttcaaacaggcccacattctcgaaccccctagccagaccttccttaaggatgaagaacgtgcagaagttccagccaggcaaactgcgctgagagtctttctcctttatatcctcctcatactgcgccacacgcagatcaaacgaagctagaatcccgttcttcattttatcaatcaaatcctccaactgctcggctaattcaggggatttggtccccggcttcggaagacgcagttgggccacacggtccacggcagacttggacgacccattgaaatcagccttcgccttttccagcactgtagttgatccacggccccatttggaggtagtggccgccctgtccgcggcatcaccgtccggttccacgtgcaggataagccactcgaacgcatcgtgcttttcctgactagtagttgcgggctgcgagctctgggaagatgcgttggccttgatccattcgcgaaggttccgtcgggctgtcgccttgtaggtttcgttgtcgtcgcatcggaggaggtaaactttcaggtatggtgtctgccgtagaccggggatctggtgtctgcgatgggcaactgtgccatggacagtgtcgctcgatgattcgcgctcgtttgattcttgcgcaggtacgaagccgatgcggagcgactcgattgaccgcacggggcgggtgggcgatttccagtggaggttttttagggggagctttgcttcgatcacgggctgaatgagcgggaacaagcccgacggatctgtgtattcgactgtattgtacggtcagcgcaagcgcaagcttcattcgtctcaagcaccttggtcgtacccgttacattgctcgaagcctgcgaagggtccatgatttcccgggcgcgatacgggaagtggccaattgacttcaggacatctcaatatccaaggtgcatgggagatttcatgcgtctggagttaaggggaaagtcgcggggtgagggagacatgctgtcaacagcggccacgcacggcctcgttcttttccattttagtgcgccatttcagtgctgcttttagatttggatcacaactgggcttttctttgttttaatatttaatttagagacatatataactctagatatgcacaaaatataggaatctatatattgtactatatgtgacatatattcaacagaaaactccgtaccaccatggccccggatctatacacgacctcacacttcaacctcaaacaccttcgctagcacggcaccaccaaccaaaagaatccctgcctgtataggcagtccaatacgatctgccacagaaaaaggaaccagagcttggttttgtggcctcagcatctgtggataaaagaacccagttgatgtgacacccagccatgccatagaccacgttaggccaagagccctttgccacagcggtttagggattttttgacttggtccacaaaaatatttccaaagtgctttgacgctatcttcgatcatgagacctagaggggccgtgatgaagaataacatggcgccggattcctgcgctgggattccttggacaatatcaaggacgagatgcaggccgcccgaacaggagaaaacaatcaaaacattcatataccgtgctatcaatgaccttcgggtaagacctaatatgtcccgagtgatgaaggcgctgacagatgtcaggggattttgcaacaattggtgccagaatttcctacaatatcgatgtgagtataatatcccttatctttatataactcgatgtgaatgagcttacccccagaagccccgtaccgtatcggcatccagcgctcttccgaacaacggagggcaattcgcaggcgaatcgagtccaagtcctacggcaataatcgaaaaaacacgatggtggaagtcgataagaatccggctaaccacaaatccagccgtgaggtttgagatgatgcgttcaatccattgttcggttgttatatcccactgagggactggcggcaacattccacttttctcttgctccaatgcctgttgcaacgcaagagtagcaaagacatccagagctagatattgccaaacagcaatggctatctggcgaaccaaaaagcaaccccgaggaggcgtgttcataccacgtcgtttataatacgctggctgtggtggggcattttttatttgccagggcgtgttgatcccacgaggatcagtgaagagccgagctgcggcgtaaatttgagccacaaagccctggccagctccagaagacaaatcattgctatctttggggttgatgagtagcaggttcaggcattggaagatgatggtcacaaataggcgagcgagttcacaccatacaaatcccggacctagcgctgtggccaccggtatagctcgatatacaatgaagatagagcatggaatcgacagataccgaagagcagactgctttggtgttgcgattaggagggccacgggtataaggcaatgggcggcatagagaaagagaatttgcagaatgttggaagaggttgacatggcccgcttatccccaagcaaaaggggaaacgcctttgaacgagtgttgatgttgcgagagatgtgattttctccagaaaggggcgatcctttcttattcttcgtaggatctgcagagaatctcaatattgagctgcgtgggccctttacggcgagcgataaatacggaggcgacaaaatatatccatcttgtttcagatcgtgaaattgatgctcttctcaataactatttgtatcttgtttcatacttagaataatatagccaacttaggcgtatcataccgtcactacagactttccacgccactaatgtatagatcgcatctgcaaagtatgttacagcacatgtcacgatctatgagatgatgatcggtcaggttttttccgtccacaccaccaaacatagggctttcccagcctacaagggtctcgcatatgtttaccacttcctccacatagtgatgcttccaagcgtcgtctagagtaggccaggcaactgcaagtgtccgaccaggtactcgagtcataaagagataagaccgggtattatccttagtctcgtgtataacacgagggatcttaaagtaggcttctgaccatggacaaaagctaacgtagtagcctcggacgttgcgccttcttcaagcgtcttaacctaacaaaatacatcattagctatcgaagaacgttctgcaacgtcatatacgaggacgatcctcgggttatctgtaggtagtggaacggtcggaggtagagggacaggcgcgttggtaagagtatagctaagattatcggtcgagtcataccaagaagagacatcggaaggaccgctcgaagaatggaggatcaggtcaccagtaagccatgtattctcatctacctgcttgatagactccctaacagggtctgccatggtctttgagctagggcaaatggtatcaaataacttgtaaaatggtggatcacgacagtttgagaaaaacaatagatggaagaccgtaaatagctgggggggggggagataaatacgggcggaatgtaaacaaagggccttgccgtatacatagatacctaggcggtacaaggataatataccgtggagctatgagtgagttaatagaacagatgatgttggctgtggtaatgataatatagggaagtattggtagatatgaagtcccattctgttcaactgtcctaaaattctcattgggatatatcaagcgcagaagtaccaaaatactatgccttcaaagcgatgctagtcgaggtgaaaatgatcaagcagaatgagggccagagtcgataataatagtcgatgctcgccacgttttaccgcgcggaattgatagcaagagcgcgacacgatcgtgtgcgggaaagagggaccgggtatatgttgtttcgatctctgataaggggattcactagtatacccctctcttggagattataatctccagactggtgatttagtagacaacttgtcttatcaaagtttctataaattgaaagacggcaaattcccgacatcaatattctccgctcatatcacagttatataaaccgacatcctagggaattccgaacaactatcaatccccaaatatggacacagctctcaacgacgccgtggctcgatttatcgagcgccaccctgaatcgcaacgcctgcataagctctcactcgaaagcttaccgggaggaaatacccgcactgtgctgcacacagcaccatacccagtgttcatgcgcaaaggctcaggctcggaattgtgggatgaagatggaaacaagtaaatacatcgatctgagcctctagaatgtgtagactaacaccaatttcccagatattatgacttcgtcggcgagttatccgccgggctatatggacactctcacccgacgctgcaaaaggtgttgacagataccattcagaacgtcgggctgagtctgggagcgacgaatgtctacgagcagcgatatgcctcgttgctgtgtgagaggtttggacttgaacggattcgattcacaaactccggaacagaagcgaatatacactgtcttgctgccgctaggaaattcaccggccggcgtaaggtcatcgtcttccgcggtgcctatcatggtagcgtgctgttctttggagacggtatcccggaaaacgacatcgaccaggctgattgggtactactgcaatacaatgatcccgagggtgtccgggaagcgttttcccagaacaatgacattgccgccgttctcctggaggggattcaggggtctagcgggtacatttctgcatccgacgagttcctacgaacaatccgcgaggagagcgagaaagcgggcgcggtaatgattctggatgaggtgatgacatctcggctggcaccgggagggctgaaagatgtgctcgggattaaaccggatcttatcactttgggcaagtatctgggtggaggtctgccattcggggctttcggtggccgacgagacattatggatgtttacaaccctctcacgcccggggctttgatgcactctggcacattccagaataacactctgatgttgcacgctgggtatgcgggactctctgaagtgtatacggctgaagttgttcaatcgctcaatactcaaggcgatgacttgcgtgagcgcttgcagcgggtctttgctggatctaagttctgcgttactgggcggggttctcttatgtgcgttcatgccactaatacgggagttcgcgcggagcagatcacttgtcgagatgattttattggggttgaggctacggatctcaagcagctgttctggttggaactggtgaatgcagggttctgggtgcagaatcgaggatcaattaccttgaacatcgctatgactaccaccgctctcgatgcgtttgttgaagccgtcgaggagttttgcaagagatataaatccttggttatggcttagtatatgtgttatcactacagtgggttcaaaatatggagaaactagatgttcgaagaagtatttagatgtgaatctatatgagaatgtgcaacacaatgcattgcacattagacataacactgcatacctgagtggcgagttttcgatgtaactgcaacagctcagagacaaaggccacgaggttcaagatggaaaagtatataaaagcaaggacagtaagactcaatcgtgcggattctacatagatagtcgtgccgcgtcattatgaacacaaataagaaaaaaacagaaacctgacagttagtccgtcatataatagggaaggttcactcgctcaggaacaacgccatagaaatatatgaccagagtaaaaaagaaaaaaaaggatggcctaaatgcccacttccacagccggctgtgtatagcgagctttcgcaaattcaaagcagtccgtgacaccttgccaaatcccgggaacgtagtttcggctccaggcgcaaataacgagaataagaagagggatctgtagaaatggtgttagctgagtactactcaagaaaagaagccggtggacatgttggttacttacccagatgaagtataggtttcggtcgctgcctagacccttcattcgtcgagcctgttgctctcggagatgcttttgttgctcacgtgagatcacattgcgtccaattgtgatgtctttgatatcgtcattctcgacttgagcgagagaagttgaagctgaggccgaagcggcggccgccgcggcacggcagtnnnnnnnnnnnnnnnnnnnnnnnnnnnnnnnnnnnnnnnnnnnnnnnnnnnnnnnnnnnnnnnnnnnnnnnnnnnnnnnnnnnnnnnnnnnnnnnnnnnnnnnnnnnnnnnnnnnnnnnnnnnnnnnnnnnnnnnnnnnnnnnnnnnnnnnnnnnnnnnnnnnnnnnnnnnnnnnnnnnnnnnnnnnnnnnnnnnnnnnnnnnnnnnnnnnnnnggggagggggcggccgccgcagcagcactgctctgggcctcgaagtgttggtcgatagctgcctctgttgcggcacggagcagactcgacttcttcatgtcggactcatcggtggcatcggggtccgggaacagctcatcgtatgaaggtggctgattgggattgggtgcagaggtgcccttcaagtaatcccaccagccatcccgagcagcaggccgatgagggacaaggttggttatgcggcgcatcattccttgcccttggtagtcttggagggcgggcatcgcgggcattgcgggtatcgcaggcatcggaggcattggagggagagccgggagattggggaaggcattagccacgctctgctggaattgattgatttgaagagccagctggtcacgccacgccacaagaggtgctggtggggcgtagccttgagcatctccggatgcgacggtttgttcgttattatccataattggcggactaatatcttggtgcatactagaccgacgagaagagctgaattgaagaggctccgagtcggaatcagtagtttcctcctcatcatcgaaatcctctgagtcatcaacagcatgatcaagagatccagaggcggaagacgcctcccacatcgagctaagcgaggctgagctgctttgtcggcggcgcgatgtgagggacccaacgctgcgggaccggtagtgacgagatggaagcaatgcggcttggtgcgcgggaagcgtggtcgctaggtccgcggcagtgaagccccgtacgctgcgagtgttggggttggcacccgtcagacgcaatcggtggacgatgtgggcatggccattgagtgcggccagatgcattggcgcattgcctgtgttgtcttgcacatcgggatttgcacctcgagccaaaagacccgccacaaatcttgtcagtcctaacgatgctgcgaagtgaagaaggctttggccggtcgtgctacgagcgttataccgcggtggccggggactgtcatccaagtcgatgaactccaagtaggtcagcatcttggagtcgagatcgccgagcttgccttggttttcaaggcccggtacttggcgttgctgacccccagatgagttaccttgcatttctgactgcatattgaagaacgcgtttggatcgcttcccatgatttgttgggctgtgtggaatgcatccgcttggcttcccaatttctgaccaagaatgttcagtgccaagcgatacatttgaagctcacgatcatccacatagcggaagaacagctgctgtttgggcatgaggggttgagactgttggacttggccaaatgtcgggtgttcatgtttgaataccacagacaccaatcccggttggagagcgggtggggtcaggcagttgaggcacttgtcaccccaaaatgtggttgtagttgccaacgtgtcgccgaaaacaacctccatgccgggataaaatccgctgcccaacaatgtaacctcagtacctcctgtgatagagccctcggctggcaccaacttgtggatcacggatggcaatcgattgagagtattgttgagaggaggccaaagttggcttgaggtattcgcaccaagacccatgggaacatttgaatcatggaagccattgcgattcgagccacctggtgtccccggacgactgggatgggtggagttgggcgttgatgccactgctcccccgaccagggtatccaaactttgtcgctgagcaggtgtcgggttgaagaatggattgttatcattgttctggttgggagtgggagggccatttccatattgacctgacatggcggacggatttacaaacggccgttcagttggtgaagcgaacccacgagcagccgcaagttgcgcagcgttgttcatggccgctgcggatgactgaggtgtctcgagtcgtgtcatagtcagttctgatggaagccttccagagctgctatgtttgcgtcgtttgctttgtggtccttggaattcagatggagatgctcctcgagacaaacttctagacgcctgaggcacgtgccctccgttcgttgagcccggagccgcaaatgaactgggcgtaagctgatattgcgaattgaacctttgttgaagaccctgtagatcagttggcgactgaggtgtaccgaaagtattttgcccgttatcgggggtttgacctgagggaaacactccagctcccggtacttgcgtcccatctgggagggatggcgaagggccagtcagtgcaggcgcagatggggcctgcgtcttgtggtcgtccgttatcataatcgaatttgtaattgcctgcgccaccacgttgtccaagtgatccttcacagtgaagataacctggaatccgagcttctcattttggtgtcggcaatagcatgcaatacgcattggcagttccacttgcattgatcctggtgggaccgacgatctatcgccgtagccaccgctggcattctttgcgggttcggtccattccttgatctcgctggtgttgaagacgatcacacgcttctcttcatctttttgaaacaattcatcttcttcgggcttcctttgcttcttccgtgacgcacgtttccgttctcgctgtatacatccactgcagattttgacatcacctccgtccaacggacgttcgtcatccgaagttgtttgatagcgatcaccccttgtccgtgcaaatgcccgcttgatcttttctctgtcttgcatggcacttgtgcatacgagacttgtaaacaattgaagggtatcgcgggtaggctcggtggcaggaggagcaaggaatttgagttttgagatggtgtgagagggaagacggagtttcttgacgccggtaggtagcggggagagggtcaatcggattggaatttgagtctcaacacgggatttgagggaagttggatgcacagtgagaataggttgtagagagtgcgcattattttgaggttgggctggggaggaggcgaagttgacaggaaattggtatgatgtgggcgaggcgaagttcatggcgggtgataacgaggcgtggagaggtgattggcgattcatattgatgcctccgaagctttcttccagaagagacgaaggagactgtccgccccattgcggagcggctctatccatatcgtgaggcattgaggtcgagtatggagattggccgttgagtccaaaagcgaagaacggagacccgggagcatgaccctggattgttagcaacgcgacaaacaagaatattgttcgaatgacttacggaaggcacggcatcaatggatggcagcccagtgtgattgctcgaaggactccagagctgggatttcgcgcgcttttggggcctcgggagtgagccattgtccgtcttcaatggactagggctactcgctgcactttcgaaatcgaaggctgcatccatcgccttgttactgacttccagatcaggatccatggagaaaccatccataggaaaagaaggatcaatattgaagggcgattcctccttgactgacgataattccgggcgcatccaatcctccgacgggtaactagtagagactagaggattttcactatgcgttgcggagttcgtcgaagcgaccgatgtttgtcgtagatgattccgtggcgattcggaggaagaactgcgacccgagtcatctggcgattcggctggcgagtccgcggcaagactcggcacttgcctcagaggattttggttttggtatggctttgaaggccccgaggcgccattcgcacgggatgttgtggctcgagcgaataggtcgtcaaaatctcccccagcattctcagttgacatctcgagttgtgtggggtccaaaaagtccatgtcgtcgtccatgatgataggatccagggcggagaatgagggcgaaaagggtgcctgagctgatatcatgcttcgtttttttcccccgtcttgatgcttgtgaatcgtagtcgatttcaaccgcccaacagccaccttcacgacaattgaatatgacgggcgattcggtcgctaaaaaaggaatctcggagacggtagagatccaaagagtatgacaatcaagtcttgtcggagtttataccaggaccagtctccgataccatggcccttgttgagagagattcgaaggtggtcggggaaagtcactgccttggggttatctggaggaaaggggagcgggaaaactgtgaacgccgatccaggccggcagaatctcgacaaatggaatcaacgattctgcttgaatttatatagtcgtgatgatagaaattaaatggttatagcagttgattgagacacaaatgattctatgttctccatatactttccagctcaaagtaaagccctaaatggcatttgtgcttaaaatagacacctcaggcctcacaaagcggtgaccaatacagtacgcaccatacgcccacccttcccgtatcttccatcgctttgatttgctgaccctacttctcccgtctgacaggggtgtgaggggatctgactctgggttctaagctgttctacagcatgcggaacagtagtccttgagatcttggaagactctgtatgacaaaataacttcttctcgctttgtgatacactttctcccattcctcgggctgaccctggggcccaataattggaacgaaaaaaggacatgtgtacatgcatgacgacgacaacgtaccgggatgccaagcgcacacagacgccattcctcgcaaaggtagagattgtggcacccagttatcggctgtgtcctaccctcgctctgttagagtaacacaccttggtggcctgcagggctagctatcgttttctgtgtgttgcttattggatatcatataaagatgctatgtaggtgacactatgatgcacttatgcttacgatcggcggaatcgccatgccaagggaccaatgagcaatgctgtgctggcatacaaaatataatggtgccaagctcagcagcgtctagggttagcgggctgcagattgtagagattatgtatgttttgtatagtaactatgaacaaaatgtacataaatagtcctggcatcgctttgcttaaccctcccacgacatgtagttcgagacaacacgggaagatatagtgtgaaatgaaatctcagttatctactctctactcctaaaacatatatttagaattaacactagcagtaaatcaactgaatcagactcacattccagaataataaatctttacttttcatttttcctcgagctaggtcatgttacgactaggtaccttttgtatgcagttgctatacaaaaaatacatcgactctataatttgctattcagcaccgacacttcatgagcttggcacaatcatcttacgagagcctccatagacagtggagaatctcttcttctcccacgtgtataatgcggactggttcgattataaggtcttcatcagccaaagatatctgccctagaggcaaagatctacggagtagttcctagcgagcaatcacacggctaagactggctagatctaatcgatcctgctaaggattcacggtcgttgaactaatttaaagatgtttcaacgagatgaattggtcaaaagtctcaatctatttgataatttgcgaggaaccaactccggaataatatgatttctatgtggcttgaacaatttcacgattttggcgcctttgcaatttagatctgacagaagcgttgaatatagaccgttcgagattttcgtcgtgaactcctggaccctattatgcaggagacggacatgatgtggagcgtctcggaataattctaagcgctggggtctagggatcatatgtaggggttcaaatgaagccttctggatttttaagaaaaagccgttgaggttggccatttatatagggaaattttccaacttactccgtgtttcaacaccgtagtctatagacaatcgacctgtccgaagtcattgtgggataccgaattctccgggtttcccctgaagcggaattaaacaaggtctatctctccgaaacaggagaaaaacccttacaggctggaaagagcggagatgttatcacttcaaggggttcgatgaaacttggactgtcacagacaaccgcccacgatcgacagccaccaaagatatgagacaatatcaaacgtcccctccttgatgatcccaatggagtatagctcaacaagggttatgcactagtgcagccggcggtttacggagtaaagtccatgcttcatctatatggcacatcctagatgtctcggtcgctaattctccacctataggcacatccacaaagtggaatcattgttccctgctagaaacttccggacttgatgatatccgctgcgatatggatttcttggcaacggagtgatgccgcttctgtcgaatgggagctatcatgtcaggaccctacatatataaggccctggcatccgggctactggatttttttctcatccatcctttgcattccattcatttcaaggtctagtaccattcattcgttctctttttgggttgacttcattgactgaagtccccttttcattctttttcgctcacctttgatacttcgatccttcgatctaaacgctgtgcgttttattctacaactttttcaagatgtctgtctcaaagattgcgggtctcctgcttagctcggccgccatggtcgctggtcacggtttcgtgtcgggtgccgttgttgatggcacttaccacgggggcttcatcgtcaatacatacaactacatgaccgaggtgcctgcgaacattggatggagtgaaaaggccaccgacctcggctacatcgacggctctggctacactggctccgacattatttgccacaaggaagccactccgggtgcgatctccgccgaggtcaaggccggtggctctgtcgagctgcagtggactgactggcccgagagccaccacggcccggtcattacctacatggctaactgcaatggcgactgctccgtggtcgacaagacaaccctcaagtttttcaagatcgccgaggccggtctgatcgacgacactaacgtccccggtacatgggcaagtgaccaactcattgctgccaacaacagcgccactgtgactatccccagcaccatcgccgctggtaactatgttctccgtcacgagatcattgccctgcactccgccggcgatgcaaacggcgcccaaaactacccccagtgtatcaacctgaaggtcaccggcggcggcagcgactcccctgacggcgtcctcggcacagcgctctacacgcccaccgatcccggtattttgatcagcatctacagcgcactggagtcctatgtgatccccggccccgctttgtacaccggcgcttcatccggctcttcatcgacctcctcgaccaccgccgcagccactaccgaagccactaccgcgtctgctactgtttctaccaccgcggcccccaccgtggctactaccagtgcctcaaccgtgagtgcctctcctatccagagctcctcttcgcaccacctcacccgcacccgcacccgcactgcccgtcctacgtacagccctactttctcgtctgctcccacgtctgctgtctcaacttccgcccctagtgggccagattatgagcccactgatgctccttccaccctcatcgagaatgcgactgccaccgcttcctctgctcctcaggttactgacgagcctgctacacagaccgccagcaccgccgacagcatcaccatcaccaccaccgccggtggtctgtctgcccagagctccgcagccgtcctcgagtctagcgccacttccactgtcactgccgaggctactgctactgctgcccctaccgccgcagccaccacttccacctctagcaccagctctggatcttcttcctccagctccacctccagctccggatcttcttccactagctccacctctacctccaactcctcgtacctcagctccctgagcgccgagaagctcctcgaggtcatccggtcgaccctgaagtggcttgtctctgacaagaaggtgcacgcccgtgctctagcttactaaaatattcgccctacatgctataactatttatagctgtgtgatgtgaaacttgttactgaacatctgtgaaactggatcgggtatcctctgtctctattgattgttctgttcggactgattgtaacaacaccgtgttacggatttcctttatattctctttcctccttgcgttttgcgcatagagacgataggcctgctttggtcttttatttttctactttacctttatgaatggaatcgctggactgctcaattttgtgatctcgtagataaaagcgtaattcttgagaccgtttctaccttgggttgataggacctgattttttgatcctcccttcttcccctctttctctctttctctctcttcctctctctcttagccagctggtttcctttcctatcggtaacataagattatacaagcactacatagatagccctttgacgatgccatatatcaacatgcagcagtttccaaggtaccacctaatacaaagatgcaaataacttaaatcaagttaagtcccagctttctggggtaagaaaaatggcctatatcagtatattaacagaataggacaagcaacgaagaggtcagtgggaaaaaaagaaatagtcctgggacccggaatcgaaccaggatctacgagcttcgaaaagcataggtatgtgtacttaagacacaagcctacccgtcggggcgccgtgctaccattgcaccatcctagggttaggttgggggtaaggagattgagagagtgaagacaagagaagtgtgttgtccgtggacggaaagggagaatgcaagcttcgtcatgctggagggaaatcatatgtaggaatggagtcaacaatctgacaactctatgttagaagatatagggcaagagtaacacagcggtcgatcacctggcataaagtatgtatcttgactagtactagtatcatgtttgacttcgttcatttccatggtatgcttctactaagtttagtctacctggggctatttgcctatgccatgaagttgacctccccgtcggactatattcatcaagtcccacggggaatcccatggtctagtaaaagctagtaccctaaggaccgttaaaatatatcttcagctccgacttatgaagtatctcaatcttccgaaactttaccattgtatacacctaagatcaggtaaatgagattaccgtcatctcaaggcaaatccctcgaggtaaggcaaatccttagtgattagggggctgaaagtacttgccaatctctaatccagtgttctagacaataacatactactctggagtataggaagcaagcttataactgcttttagatcccgggtctcaggactcgctcatccattcctatcctatgtcttcactcgtcccctatacttgccaccaaatatacctggggtggtgcaatggcagcacggcgccctgacgggtgggcttgcatcttaagtatacatacccatgcttttcgaagctcgtagatcctggttcgattctgggtcccaggactattcctttttttttccttacagaatgtcgattccatactcctatttctgatatttgtctatgcactttatcctatgtctcattggtggtacgagcgaaagctaacagttattatcatttcctactttttgagtatgtggatacagatatatatgtcagaagaatatcagcctaggcgaggatacatagtcgtggggaaaaaaagggaaataatcgtttaatatatgtctcgtgcttattatttagtatcctgtttttcacataaaaaatggtagtctctgtatgggatttagacttgatgtgatgattctaggagaaaaaaatgtagaatatgcagaatcctttctatatcgacaagacacctcgttatcaacaaatcagcccggctagctcaattggcagagcgtgtgacttttaactcactagcaatttatctcagatatctgttagcacttgaaatcacaaggttcggggttcgaccccccggtcgggcaacattaaagttgcccactgctcatcttttttgtatctaatacaccaagatattcatttttgttctgttttctcactttgccgttaactatacttcctccttgtagcaagttgaagtgattgtgtggatatacttattcctcatcggcaaattccaggcgccactaaaaatactatctaggtagtacgatatttatccaaggccttatatactccgtatcattgccaagtttaccagataaaggacatttacgaggtctacagccttggcaggacatctcagtctggtgcctagccctgaagaccagatatatgggaggcggttgatactgatatcaatgatacggagacacggcgagatagcagacacgggaacgggagtggcaatggaaggcaaggcggcgagaggggaattgaaattgtcgaatggaacgggggagaaccatggagaggaattgaagcaacagagtgatggtcaattgaatcttgggttgaagaatagttcttttgttttggggggatttatggcggtgggttggggaatatgtatctgagaaggtagttgcccatctcaccatgtatgtttcatctctagcggtatgcgctgatttattgtttgtacagaaaaagtgctctctatctagtggtatggacagacaatcatttaatcgtcgatcatttcttcttcttggtcttatccacaacctcaatcatctgtgacttcaatccacggcgaaccagggctgtctcaatggcctttcgctggtcgccctgcaccaaaacttccatgatccccttgggggcaccagtagcttgtgtgacactagtgctaccggcacacttcttctgcagctcctgtgccaacagactaggaataatgccgaagacctccaaagtcataactttggtaacggtcttggagcctgtccgcttctcgagggtgacatggaccttcggtgcggggcctgctttcggcttgacgtctgcaagagtttgattggtcttcaaaatgacatggtacggcgaaagcagtgttttatcatccatgagtcgtttaagaagaccatcgcgagtggccttgccacgtgccagtgtccccttatcttcggttgatgatgaattgaagatggtgttcgcgaggaatgggttgagggttatgatgcgcttgttctcttttgagatgatcggggggttttgggattcaagatattgatccaagtgactggaaacttcggagtatttgtagaagttatttgtgtcgctggcagcgagggcagggaaaatggttggcactagctttcctgatggccgatatagactctgcacagtgatcgtttggcccactgaagggtcggagccatccagcgcagccgactttttgccctcgggtgcggtcgccttgttgttctccagagcacgcggtgaaggcaatctgtatggcacaaatcgctcaacccgatggtcctcaaagtccacatcccaaataacggtctcttgaccattacgttccttggttttgacaagcttcgatttgtctagatgtttcatgaacttctttacgttcttccaactggttttcttgatgttgtaatgctgagcctgctgaggtgtgtgcacaggaagataaggagcagtgaagttggctatcaatgccgaagctgtgattggcagtggaaggccatggtctgctgcggacggattatcctgcttgtgcttgtagagggcgtagacaaaagcattgacgaatgcgtcgtcgatttctattatttgtcagtgtttgattgatttgagttgggaaaccaactgctggctgataaagagaaaggtaggggtgactcaccctctgttgggggtgcatcgacctcgatgacgggttcttctgatatccttgggtcattgcttagtgtttcaatgtcccccgaggcagctgtcggctcatcatcctcaattttcaattcctccatttgttcttcaacaccctcggtttcatcctcgtcccagccctccaagtactctggagctgcacggcccggcagtgacgcagagctccacgcccaaagttcatcaccctcccaatgcaatccacggacggcatggccctttgtgccttgcacctctcccaatgccgaaacatcaatctcacagacgcccacaaaaagtggcactgtatgtcggtctacactcgcgaccgcaacaacggcgcccttgaccgccctttcagggaacggaggttcattcgcaaggcccggcgtcattaaatcagctccaccatggagctttcccatcacaaactccggagtatagagtaacggaaccaagttcgggttgtgccatagtgtatagacagttgggaatagtcggttttcggcccccgggccgtgttccagcttgaaccatagcacccgctcatcgccgtcgggatgtgtcccaacatatacgaccccttgaagttcgcgtaggtctggaccagcagtggttgtaaaacgagcggtttgagtgttatcgggcaggagggcattccggatcgttgtgaggctcaatgcgggggcagatgcggtgctgggcccagacgagtctgctttggtgggggccgaggtgacggggatttggtaatctttgataatttggtcggcaatcttcctacggtcagaagaccgtagtggagaaagatttttgatctggtctatatgagcagagagtcctttgcggtgggagggttggaaacccaaagcttggaggggcagtgcggggagagaggtcgtttaccgtaggcttctttttgaacataattgtaatctcaaagctcgaagcttaaagtgcaaagtgtaattgaatccacacaggtcagccgaagacgagagggagaagatgtcaagagtaaagatgtgacgtccgatcaaagaatctcccggagatctccacatggcccgaagaggaaaagaactcgttttcttagcatccgtggaattcgcgacaacgccagtctgactcaaccactttatcaatgcctaattaatccattcttccacgtaatctctcccaactttacagtaaagctggcacagaaaggctgaattttgatggaatgggcaagatggttcaatattaggccaagctggtagctaggctagtccctcacagttgagaaacagggtattgctatggtgagaagcattgttgaggtatttatccaaaaggctagagattacatcgaagaaggcagagatataggtacaagcaatgaatcctcaaagctagaaggaagaaagtcccaagtggtcaaaaataactccggacagatgaagaatagcgttattaaatcgaacgaggcatcgtaaaatagtagattgagacatgaagtcaatcgtccgattgtctcggtattggtttgactggtcttctcgatgggcccattccttgggaaaccacaacccagaagcgccagtatgtgcgtcattgaacaaatggtgctgcatgcaggccatggaatagtattatgtatatggtgcaatttccggaacatatccggctgcattcacctcaccccttggtaggtgcctcactggagtctagcctcaagctcgcatcctctgcttctagctgaatccatcacatcatccgagagaacttcaagatgttttcggttcatcgggactatacttccagcgtcggaagttatctgcaatccaccactgcgacacatgggcggcctcgctaagccacctcgcggcttcgggcccgtgccgtgtctggacggcatcaaacaaggacacgatgtcggtgtcttcctcgggactgaactcgagtgggtcggcgacgacattggtgaatcgccacggggcatcggggataagcggcacgacaagacggtacggtttcccggctgctcgcatagagacccacgttcctccagggttcatcgtggagaagtgccattctgacttcttatcctgctcggatataagtgggcgtagcaacgactggccttcgtatataggaagcaggtccttcagtatatgtgccgactgttcgttgatattggaggtttcgattagaatatcgaggatactggggagcatttgagtcgaaaggacggcgccactgatttcgatcgggggtagcttaggatgggcgaggagtaggggaacgtggaaactgccgacgtgggggtcatggttggccgttataccaccatcatttggaagagataaaccgctataatcgagttaatgaaaggttgatagggtctaagaaaaaagacaacttactggtctcctgccatgacaagcagggtttcatcaccgaccccagcctcttcgagaatctcaaggatagaggctagccagttgtcctgatacttgatagtattgaggtaccggttcaagttatcgttccatccaatgccattcccgaagaatttctcgtattcaccaggcttaaaccaaggagtatgggtattgtgagttaggtgaccgataaagaggcgagtattattcttcttagcttcggcaaatgcgtcccgcatatagttctttagtgtatgatccgggtgaccatatttctgctcttcctctggctcctctggtatgtatatagcgccggcttcattgattgattctttggttgtgatatctttgaatcccatgacaggagtaagatcctcctggtggtcccaggtaccataatgggactgcatccacttagaatgccacggccaggaggtccaatcctcagtatcactagtgatatttgattgttggctcaaagcgtggaatatgtgcggtaggcaaggctgataaatatcatgcaggtactcaagattaccttggacaggcatagggctcacaccgcacatagtgcctgtaatacttttcatggtgtatgtaccggatgtataagcatttttcgcgctgaggccaccatagggctttggacgatccttattctctttgaaaccagtctcaaatccggtgaacatttgggcgataggggtgagattggagagtttatccataacttcctcagggacatttccatcccaagactttttcaggtgctccatgatgtaagagtcggagcggaagggaaagacgtcctgccgattgctttctaatttgatgagaataatatgtttgatcttgacgtctccgctgtgaagcacgtcacgtataggctccagaatttcgttctggagattgggaaagtgtagcggatctttcaacgggttgtagtgttcgtacaaatactcgttaggtgcggtattgttgaagtgacttatgcggaagggagaccagtccgggaaggcagtcgctgcatcacccgtatgtaaccaatcgaatgtcgggaaggagtccagagtatttttgtcttctagccagcggaaatcgcccggtaacgacaccacacctcgttgagaggacccgaacctgaggccgccaaaaggtgcgagaggcagagatgcggagaggaaactgtaagtcatatcgtggggacgaacgacacggaggaaaagtagaattgcgctgcacgatacgacaatagcgggcttgagcaatgcctgactcttccgtacaggcgggtctcggggcgcatctagcaacgataaggagtcgctgtcatcaccgagttcataatcatcgattgcgatttcttcataggtatctgggtgtggcagagcttgcttattcggacggaagtagcgataggtcgcggaaattactgcagcccagaccctcaggaaggctgcagtgacccgggatagatacggtgtggcgtagaatgcgcctaccaaaatcgacgtctcgagcaggatagcgacgaacagggctgacaaaacaagcgtggcggcgggcttgtccttgtggaagccactcgatatgcgccagtggatctccatgcccttgtggatataaaaggagatgttggcggaaatcattgacgaggcatatagactgggatggttagcgattcattcgctgtgtgaatccgagaaaggcctacctgaatagcgcagtgaatacggctgctatatcccgagtcgttcgccattcgtacgatcgggcgagactgcgcgcgcccagaatgagcaggatatccagcaaaaagaaggtgggaccccaggcgagaagggacaggaccgacagcgcattgagatgggcgtagatatggaaagccttggaaagcacgagggagatgaaaatgaccgaaaagaaatatgcgcgcgaggctgcccagccacgattaagatggtcctgaggtgatctggcgatttcgagggcgacgatggctgcagattcaagcttcccacgcagccgctgggaaagaccctctttcagctcccagggaggtctcatgatatatgtacaaaaaaagaaaactgcaatgcgtcaaatcatacaagaacgttgcacctgaattaactaaaggacagaattttccccatggatgtaatggaagaggtgtaggagaagaatccgataaggattttagaaataaggagagaccttcaagcagagagggtccggtccactttccacacgcctagaataatatccgacatctttgggaggcaaagatcagcaatgcctatcatcgtagggctattccgccgccaagactcccaaaatagcaagtaagcacgcgatggaaatatctgtacggagtacggagtatctcaggttgataacaaacaggggagacggggacaggtgccagttgtaaactgcctatttgggactaccgagctatttacaatggccatagcatatacggaatactatcccacgatattgcctatgttttacaacatagcaacatttggtctttcaaacttgctcaaggcgtttgtggagatcgccttggcaaagccacgtacgtggccccgtagcgatgaaccttgaacccgttagaattctcctggagctccacatctaccccattggcggttaaccttggaatctgatgctggagcttccaaggttgtcattatgttgtacaacataagtattgtaacatcaaagataactaagcactgttgttagtgaacctcgtgggatcggtcttatcactatctcatcccattcagctgaaggatgcacgatgagatttggtatagatcaggtggtggagcataacagtaagattaccattttagccacatgaaagctgcaaaggtaaagctgttcaaaaaataccacaaacatctaatagcaaaagtcaactcgttgggtttagggctaataaaacaaatagtatatcacccgaggaagccacagcctatgggctgtgttgcgatgccaataaggcaaagaaaattaaaagaggtcaccacaagaaacataaagtgacattggagcgtaggtaggatcatagtacagggcccgaaggatatatagttgaacttcagggttccgcatcaaggtttgtccacaggtaactggtgctgtgctgttcagtgccagcacgtataaatctcgatgatagagaaattaataaatcatggggaacacaatacaacatagggctgctattatgatcggcggtagggtaaagtctaatgagtaggcaggtgaaattggtgcctggtgtaggaggtagaagattccaaggacaaaaatagttatacttaggctatatagttaccacaatatgcaagactaatcatcagcaagagggatccccaatgggtccagagtccactgttgccatcaagagctatatcatcgcatacgatatccataccaaggcatcggacatcccccgagaaccccaccggcaccccgccgagcataaagagacaattaccggatgcactaaacctgggtaaagtacatctacccttgttagtgaagaatcagccaaaatgccagtctatcacatcggtgagttggatgcaggtatccaaaggatacgaaacatcactaaccaagctccaagtcctcttccgtctcaaatctggtgtcaccccggcccagatcgcgacctggaaggagacatgccagggaatggtggggaagattcccggtacgtgaaattctgaagttcagatcgagacagtttctcatgtaaatcctcacaataggactgctgtcgctgcagaacggtcccccgctgccaatttcgattccccgcgcccacggcttcgatatgggacttgttgctgttttggagacgcctgagcatgtggctacctatgcggtacaccctgctcacttggagtaagtcttcttcgtcgtcggattagtgaggaccgtggctcatttgctgacaccttggagggttcataaaatgcgcgaggagttgtgcgatgatactttggcctatgatctagagttctaggcgtttgatgtagtactaggtttcccataaagcgaagaaagttgcgaacagtccgttcaaaagtctcatttgtacatatcaaaccctaggtaggccccgttaatcgtagccactggggcctgcctagccaacccgtagatgctcgtaatgaaatgacaataacgccgatagaaggttcacctctatgaaataatcggaaaatagaggcaggtgggatctccaatccgcaatactttttgaatcccgctgattgaccgaatcagagaacaagaattaaagacaagacatttcaatccgccgaaactggataccttattccttggcatccaccttcttggcagggtggtcaccgctggtgccctcgtcctcacgggagcgcttctgggtgctctgcacgaccgggacaccactagaattgaagtcagcacttatacactcactgcgaatatcagatcactatgacttaccgggagtccttctgggcctcacggggagcctggaagccattctgttggtcctcagtgcggcgttcgcgccagtcacgaccaccatcacggtcattgcggtcacggccgccacggccacggctaccaccacgaccacgaccgccgcgaccaccacggccaccacgtccaccacggctaccaccacggccgccgctgttgcgagcgttggaggggtagacgttgccattcttgatctcctcgaccttctcgtcgcagtactccttcttgctcttgaagatcaggtcattctccttccactgaggcttcttctccagagcgaggaatgccttttgcttctcctcggactcaaactcaacaaagatgctgcccttgaaggtcttgtcgttagtgcggcgcagacggatggcgtttgtaggaccgtagggagcgaaaagagcctcgatgtcgagctgtgtagtgggttcttcctcgccaaagccgaagcccttggcgtagatggagcgggccatggaggcatcctcgaagaccttaacggccttggcgtcgtgctcgtttacggactcgggcagagggaccttgcgcttgacggcagtgtcgttctcggtgagttcgacgttctcggcggtcttgagggcctcgacaattgccttgaaaggttggaagcggcgcatgcgcttgaaagagtgaaggagttcaagggggacggcgttgttggcgctgccgccaaccttggagagcaggaacttgtccattgggaggttagaatcggaaaagtagaattcgacctacggtatgcgcgtcagttaagatctagtgaaggagcgtttcaaatggtcatacctgcttgcggatctgcacagggtcgtcggttacctctagggtggagggatcaaacttggcgttgttctggcgagggccacggccaccgcggccatcgcgctggaagctgcgggtctcgcgcttctcagtctggggctctgtggacttctcctcggccttctcagacttctctccgagcttagcggcttcggcgacaatacgggcctcatcggcatcctgagcaggcttctcggaggtgccttcctccttcagctcggcgagaacattctgaacatccttctcagcctcggcgttgacaacgggggtcttctgttcttcggtcatagtcgcgaattgtatgtggagactatttcagatggcaaaaaaaagatgataagcaggaagtttcgacgcgacggaaatgggtcaaagaaagcagaaagtgagcaaggggtcgaagggaatttatagccaatctcgggacatagggcacaatacctttatgggttgatcaatgcgctattcagaaaactattgcgcttgtgacaatatcgcggcggggagaatctgggaattttttttgagctccattggcgcctgaggcaggaactagtctgcaattggctagcgtggactcgaactattccctttttggcaattcaacgttctctatacattgtcttctattgtcttcattgtatgcaggaaaaaatggaataacaagagatgaataggagtagaaacaaagttctcgaagggaagtattgatttgactcatagtaactacattatgtactcatatttcgtcaagagcgtcaaagtcagatcgcaccttcccgaaggccaaggtgatttattgatatgctgactccctttcccgggggtttcgaacccatattgtcatggagaattctctcttgtcaaatatcacatatatcttcagttgaatattatttcctggtcgatgataatccgggtaccccgttcaccgcaggatagtaacattatcaggccctgagttgtaagtagcgtctgtcaacccccggattcccattatgttaacaaacgggatatatggtagttgttctccacatacaataccaccggacccttcacttgaagtgctgttttcaatattcaacaggctacaaagcaggttcgccaaatcaaaatggtaccatcacaaagggtttcgtgggttgagggaacctggccgaccaaagatgtattcctcccttctcctgggctcgagatgccatcctgatcatcctcaacagatagtatacctttcaatcgtcggtccattgatgcttgcagctctgttcgagtggtttctctggctcagcgccttcatatactgcctgatcaaggtgtggatgaaagcagaccattggactataagagttctcgctgtggttatgatcttcttctttacagtgatacggtaggttttttggacttcgggacctcattacctagtaatttcattcagggacatccactgacgaatacatagactggcattcctcccagtcatgctcgtgacactgccgttaccaccacaaatcacagttgacttaccccacaagatagtgcatgggtttcaaatgttcgcattctgggccttttctgttcttctgatcggcccatggctattctgtgtttacggtctcactaccaattcattaggcaggaaaaagaggattaagcgagtgcttgatgaccggacagccccgaagactgtggttgtgatgccagtatacaaggaggacccaagtgtcttgatcaaagccatcaactccgtggttgactgcgactaccctgcaaattgcatccatgtcttcctttcatacgatggtggcaaggtggacgagccgtatctccgggtcctcgaccatctcggtattccgatcacactagagagctatcctcagagcatcgactgcatttacaagggtgcacggatcacggtatctcgcttcaaacatggcggtaagaggcattgccagaagcatactttcaagcttatcgacaaggtttatgctgagtatttgaagacacatgacaatctgttcgttctgttcatcgattccgactgcattcttgatcgagtctgcttgcaaaacttcatgtacgacatggaacttaagccaggcagcaatcacgatatgcttgcgatgacaggcatcattacgtcgacgacggagaaaaacagcttgctgacaattcttcaagacatggaatacgtccatggtcagctttttgaacgatccgttgagtctggctgtggtgcggtgacttgtctccctggcgctttgactattctacgcttctcggcttttcgcaagatggccaagtattacttttcggacaaggctgagcaatgcgacgatctcttcgactacgggaaatgtcatctcggggaagaccgatggctcactcacctgttcatgattggtgccacggagcggtatcaaatccagctatgtatgagcgctttctgtaagaccgaagccgtccagacctttagtacgctcttgaagcaacgccgaagatggtttttaggtttcatcaccaacgaggtttgcatgctcactgacgccaggctctggaagcggtatcctcttctgtgtctggttcgattcatgcaaaacacggtccgaacgaccgcactgctctttttcatcatgatcatcgcactccttacaacctcaaaaaaggtggaggatcttcctgtgggattcatgggggtctctttggggttaaactatttactcatgctatactttggcctgcgtctcggacgctataaagcctggctttacccactcatgttcattgtgaacccgttcctcaactggatttatatggtctatggtattttcacagcgggccagcgaacttggggtggaccacgggccgatgctgccactgctgatgaccataccacgccaggagaagcagttgaacaggcaaaggagcagggcgatgagttcaacgttgatgtcgatacgttccgcaccagccttgtgcgacagagatctgttcccatccgcccatcggagaatgtggaaggtcgatttgcacctgccaagcagctgcttgataggtttgatgtcaatactgggcccgcgctcgcgcggatggtcggcgcgatgggaacttccgagaattcccagtaccagttaccttctctctttcgccattcaactgactctgtgctcagtgcatcgtcggattgcggctctagctcggttgctacaccacagaacgtggaaaacctcctgatgagtgaagaagaccagaagaagccctatcattctcgccaaggccaggcatcaacgagctcggtgagcctggatagccaaaatttggagaaccgcttgaatgatgctcttccggctttggtttctgcatccgagcatgataacctaggactcacccacccaccaggagcataccagcctggacgttttgaaaatatgcctccagcctacacagatcccgaaccaacggtgccgaacaaattggcagcgaaatgacctcaaatctcgtgacccacctcatgatattattgtctaacaagaacatacgttgagggtgcatgacgtcagtattcttcattttcttctttcttcctcttttttttcgtctcagcatcatcatagcttttcgaccacactattcttatgttttccagcgcaattttgttttgtctcacttctatagcttttagcatccaaaacacatcccagtctcatatgatgtaaccaccgatccaccgtagacgatcgatttttattctgccggccgcggtgggcggtgaaagtgggtagtctagcaatcgctagaagattcgatgagataccagaagagtccgaacgcccagtaaggtatatagaccagtaggagagagggaaatagagaatgaaagcactttctgacacattttacgttatccgtttataccccaaatttgaaattctttagttcggcgcctaaagagcagccagaccgcttgacacttgtcatcgcccctccaataatagtggagtggcgtgcaaattctcccctccgacttctctcacttttcctccttttgaatctcccatctccctccacctctctatctcctatatccccctactttcttccataatgagtgtcgtcggtatagatttgggtgcgcaaagcaccaaaattggtgttgcccgcaacaagggcattgacattgtgcgtattaccccacggtcttgatctggactcgcggtcttcttaggatgaaacatgacctcacaaattcgagaatttgcgctaactgcttgttgttgacattatagattgccaatgaagtctccaaccgtcagaccccgtatgtccccaaattccccgctatccactaaataactgacgactgatttgaattgttatagctccgtcgttggattcactcctcgcagccgaaacctcggcgaggccgccaaaggtgcagagatctcgaaccttaagaacaccgttggctccctcaagcgcctgatcggccgttctttcaacgatcccgatattgccatcgagcaggaatacaacacatgcaaactggtcgacgtcaatggccaggccggtgtcgaggtcaactaccttggcaagaaggagaagttcacagcaacccagttggtcgctgcgtacctttccaagatcaaggacatcaccgccaaggaattgcgcactcccgtctccgacgtcaccgtcagcgttcctgcttggttcactgacgttcagcgtcgggctatgattgacgctggtgatatcgctggtctcaacatccttcgtctcatcaatgacaccaccgctaccgctcttggctggggtattaccaaattagatctccccggccccgaggagaagccccgccgtgttatgttcgtcgacattggttactccgattacactgcctctattgttgagttccgcaagggtgaactgaacgtcaaggctaccgcctacgatcgtcacttcggtggtcgtaacttcgacaaggccctgaccgagcacctcgccgtcgaattcaaggagaagttcaaggtcgacatccacactaacggcaaggcctggacccgtaccttggtcgccgctgagaagctcaagaaggtcctctcggctaacgcccaggcacctttgagcgtcgagtcccttatggatgacgttgacgtccgcgctatgatgaagcgtgaggagctcgagctcctagtcaagcctctccttgatcgcctgaccgctcctctggagcaggcactctccgaggccaagcttcagattgaggacattgaccagattgagatggtcggtggctgcacccgtgtcccctctatcaaggaaaccctcaccaagttcttcggcaagaacctgtccttcaccctgaaccaggacgaggccattgcccgcggttgtgctttcagctgtgctactctctcccctattttccgtgtccgtgacttcgccgttcacgacattgtcaactaccccattgacttcacctgggagcagtcccccgagatcccagatgaggatactagcctcactgtcttcagccgtggcaatgtcatgccttccaccaagatcctcactttctaccgcaagcagcccttcgatctcgaggcccgctactccgacgtcgcggctatgcccggcaaggtcaacccctggattggccgcttctccgtcaagggcgtccaggctgatgccaacaacgacttcatgatctgcaagctcaaggcccgtctcaacctgcacggtatcctcaatgtcgagtccggatactacgtcgaggatattgaggtcgaggagcccattgaggaggagaagaacgaggacgagatggacgaatctaaggatgaggagcccaagaagacccgcaaggttaagaagcaggttcgcaagggtgacctccccatttcctccgccaccggcggcttcgaccaggccaccaaggaggcttggaccgagcgcgaaaacgctatgtacatggaggataagcttgtcgccgagaccgacgagaagaagaatgagctcgaggcctccatctacgagctccgtgacaagattgacggcgtgtactccgagtttgccagcgaggaggagaaggagaagttgaaggccaagctcacgaccaccgaggttagttttgaatcagcatctatcaataactattgtgatcaagcgtactaacacatcaatttaggattggctgtacgaagatggtgaagacaccaccaagtctgtctacgttgccaagatggacgacatccgcttcatcgccggccctatcatccagcgctacaaggagaaggccgaggccgagcgcgacgccgtccgcaaggccgatgaggaagccgccgctcggcgacgcgccgaacttgaggccaagaagaacgctcagggagattccgacatgcaggatgcccccgagggcgaacttgaggagcagtagatgcattcccacgatattggaatgatttgctgatgagttttcttatttttaagggttgggtatggaaaacccaattccaattgcgttttactctgatctagcaggttcgctaccaatttggatcggggtaactcgccgcgttatgacgaaaaggactttttttaaagagatgttccatggacctagagatttcaatcggcttttaatcgttggccacctttttttggccacttttttgttctaatggcaaacggttatgatgtagatcgttcttgttccctggatgtttatgaatagatgaaaatacactcaacgcctttgtcttcattgttgagatcctgtatgaatttgatatcaacatagctcattggcgaagcgacaggtccctatcgtaataaacttggactttatacagcacaccaaccctaggccaacagcctttagtttgcacgtattgtccttttcacagtcgtacatacagtcagcggctgattattcccagcagatatttataggcgtctactatatatatatatcacataacaattgaagtatacggagacacaagcggtgaatctcaaaagccaataggactaaagtccctaatggcgctgacactgcgatactcattgcaccactttctaccccgctctagttaactacagtgtactctgtaattaatacatcaacatgactcgggaaccttgggagcgaccatatataaataaatcacccaaggatatggtgatgcacagatttgtatggcgtgaaaagcttcattttatacaaccacgcagaaccgggcacctgggcagcgtacattgattactatgcacgtgtaatagtaatttaggtattttaagttttctgctggtaaaatacggcatttaggcatcaaatacccccaaatctagggtttgaaccatgatataccgcttcgtaactggccctatcatggctctatgcacctcaaagacggcctgccgcagatacgatagaggtaaggacaatattccacagtagaagcaaacttcttatgacagtcgcatcaagcaaagttaagaatcctacccagcttgccgtttgttattgtgtcagcctttcttattcccctctcctctcacctgttcctctcttgatcttctccctattcttcttcgcctttttgatcagtgatttctcttgcattgcaccagtcctccaagttccagtctatcttgagagatggcgcaagatcaagataagcgaatgatcctccggcttctgcttgaggatttagatgatctcgaaaatagacagaaaggaaaacaaggcacaggaaaggaaacagaccttgaaattgccatctcatgcttgagggaagatattcgggctatgcaaacttccatcgacgacgagatattggcgcttagcacgagtactgcaatcgccactgaccagaagatactcgcgtctcttcttcgcgaggaaagacttgctaatcaggaccaccaattcgctctcgccctgaacaaaggaaccgctaatcgtacgaatgccttggcaaacgatatcgtatcgtcagatgacgatgacgatgccgtttccattgtcatgggggatctcatgggccggatgtctgtgagtggcagatcatctaacaacggggaaggctcatcatacatgcgttcatctcgaggaaccaacttcatgagtgaatgtgcatcctgtcttacaaaggtcgagtctatcgtgttcaagggtgcgtgcggtcacgagttttgcctcgactgcgtaagacagatgttcctcggtgccatcagagacgaggaattatacccgcctcgttgctgcggcaatgtcataccgcctggtgttgctttgaggatccttaactacgaggagcttcgaaatttcagtgaaagagcccttgaatggaccgcaaaagatcgcctctattgcgctgagccaacatgttcgaaattcattcccccattcgctatccgagacgagcacggcacctgccccgaatgtcaccagcggactcatgtaccatgccgttccctcgcccaccctcgcgtcgattgcccaatggacgagactcttcatgctgtattggaaatagcggattctcaaaactggaagcgatgcttcaattgccgaaccatggtagagttgcacgttggctgcaaccatataacatgtcggtaagtgagaaacatcccctacaacaaacaatatcacagtacatgagaagaaactaatgatttgtagctgtggccgcgaattttgctatgtgtgtggcttggtttggaaaacatgcgagtgcccactttggcacgaggacaggctcgaagaagtggcaaatcgggcggtacatgaggaggtcccggccaacgccaataaccaagtccgccagatcgcatttaaccggatagtcgatggcctgcagcagcatgaggacaacggctgcgagcaccacaggaactcgcaatgggttttccgtaagactggaagtttgcagtgtgaggtctgcaaccattatatgcctgagtacattttcatgtgcagaggttgccggattcgggcttgcaaccgttgccgaagacatagaatgaggtagttcgctgcttttgcacggcatctcgtgaaagacagctgagaggcatggggttactctgcaagtcattcataccagtctgcttggtgggagtagaaggaagggtgccattttagactgtcaatttactagatttgtctttgagcattggggtcctcgagccgatctacttgaacgaagatatttgctggcagtttgggcgtaattcttattggaaatcaaaacgcacttttgcgtcattcgactagcggagagcggagataatacatgttaagatttgatgtgtatagcacttctatcaattacctcgttagtttctgactttgccttactgcctgaggcattcacattcttgatatcacgtgctagctccggcttatctccgtgctgacaaaacctatcgccgtggaatcaggtcgaattcgccagcgcctgcctattcgggccatataagcagtttccttatcgcagttcttcactcacgagctcttctctcacgatttgctgccatacgatcgcacatatacttgtacgctataatggactctcccaaggagctaaccgtccaccaccatgggaccgcgcatatcattcaagttcccgcctcggcaacattacaagacctctcctccgagatagagcgcgtcctgaacattccggtcgacaaccaaaagctcctcatagccccaaagcctggaatgcagaaagcgcctttcccaccaactctcctcgacgccattctccaaccctcctccccaaaattcaagatcaccctcctcggcaccccggccaaagcaatcgccgatctgcacgaacaatctgccagcgaacaacgacgacaagaattacgtgcgtctgccctaagtgccgcaagacgcaataaacaaacaccgtcgtcccgtagcggcggcatccacaccatctcatcttcaagcaacaactacaccttccaccgcctcctcccactatcatacctccccaacccagatcgctccctcgacttcctcaagcgcctccgtgacgacccaggcatccgcgccgcaatgacaaagcacaagttctctgtgccgctcttaacagaaatgaacccggcggaacacacgacgagcgagtcgcggacgctaggtctgaaccgaaataaaggcgaggtaattgagctgcggttgcgaacggatgcctatgacggataccgtgattaccgtactattcggaagacgctgtgtcatgagcttgcgcattgcgtattcgggccccatgaccgcgacttctgggatttgacgtcgcagattgagaaggaggttgatcgcgctgattggaaatctggcgggaatcagttgtctggtcaggagttttataatcctggtgattgggatagtgcacaggatggggaggagtttgttgatgagtgtgggtggactggtggggagtttgtccttggtggattgcaaggggactcgactggaggccgaaatgctgcttctggcgggacgttgtctcgtagggaaatcatggcgcgcgctgcagaggagagaatgaagagggagagtcaggccggaaagcaagatgatgccaagtgatatcatggcacgctatgcttttcatgatttacgagttcttgcttttgacctacatagccgttgataccatatttttagttcgtaattaactcatttctgtacattgcagactgtatattatcacttaattataccaatctagatatttacagctgctcgttaacaaagagaccagccataccctgaccagttccaatacacatggaagtgaccagaatcttgctctttgtgcgacgagcctcgctcagaatggtcgcgatctggcgtgcacctgttgcgccgagagggtgaccaatggcaatagcaccgccacgagggttgaccttggcgtggtcaagaccaagggtattgacacagtagacagccatagaggcgaaagcctcgttgatctcgtagatgtcgatatcattcttgtcaagctggaacttgctcaacagcttggggatagcggcagttgggccgatacccataacgcgagggggcacaccggcaacggtagcgccgcagaactttgccaggataggctggttcagctcgatagccttggagcggcgcatgagaaggacagacgcggcaccatcggtgacctggctggagtttccaccagtggacttgtcaccgaactgcgggaacgcagggcgaatcttggaaagcgactcgaaggtcgtaccgggacggataccatcatcacgggacacaatcacctccgtaatctcgccagtcttgggatccttaaccttggtaggaataggaacaatctcgtcagcgaaccaaccgttgttctgagcagcctcagcacgacggaaagactcggcagcatatcggtcctgctgttcgcgggggacatcgaagtccttgccgatgttctcggatgtctggcccatgggctgcatgcagtcggcagcctcctggttgcgcaggacctcctcgttgaatggcttctccaggcgttcgccaggagcggacatgagctcggcacccatagcgagaccgatgtcgatggcgcccatcgagatctggttcgcaatatcctgcaccgccttcagtccagacgagcagaagcggttcactgttgaggcaccggctgtgtgggggatgccggcggcaagagctgcggcgcggaccatgtaggcggccttgacttcgttgacctgtctttgggttagaatatgccacctatgagtttatggaggaaggaaagggattggacatacgttgccgaggcagacatcctcaatcagagcagggtcaatctgtgacttggccagagtctccttcaacagggcgtagaggagatagtccaattctgtgtccttgaatccacccttacgcgcccgggttagcggtgtgcggattgcgagggtgatgaccacatcgtcggggttcttctgtgtactgtgtgtgcttgttagactcatgacacacaactgagtttgtctgaagacttacatagcagcgaggccgttggcggcgccgggcttgaggtggctcaggagtgagcttaaacgatcagcagccattatgtatgaaggtttagagattggactaatatatcgtcagtcttgtgcttctcttctttgttgaagacgccggtactggcatggaagttttcggtcttaatgcggggaagcttccacgtgcggagattcgaggagagtgaatgcaaataactcaggcactgggagaataacttacagactgtacagaattaggatagagacgaggaataattcaagcaaaggggaggaagaggagagagttaaaagaagtatcaagaggaggaaggtcgacgttccggccgaggctgccgaggttcatttcgcctgtcaggttatccggtcaataagtatctagtacttcagatttgcccagaactactaactgtaggaagtaccaaatactttaccaagatctatttccagttttatggggttggcttgtggagatgcctaggtaactcggtttgtccgagtattattggaactttggaatatactgtaacataaaccattcatttctagtgtctagataggggtaaaccatgctattatttcgttagttctggcatacttggccttctactcgttgcccgttctgggatgcgatattccgccacttgttcgatcgagacgttgtcgctcacgtcgacagtaatcagttctaccgatgtgtcgatggaatctatatgtatacactcggagagatagctatgtgttgttataccttcttgatgatcactaatatgtgcccaccattatctcctggcgcagccaatcctcaaatcttccctcgtgagctttggggtcagtgtcttcccagttataagaaccagtgtgatagttcaaaatttcgaaatacctatggacgattagcacagatcaatacgccgcagatggggaaaattcatacattttgctcttccattcatctgtagtcatttctgaatccaacaaagacaagtcaatttgtttctcacactcgggttcgtcattagagtccgaatagctcgaaacgtatggatcggttagggcatcatccgccgtgattctcttttgtggatctatatccagcattttctccaagagatgaacggctagcgaagtcagtatcattggaggtagataaatcaggagcatttgatatcaatcaagatctcaagggcataccttcagggtcaacatctcccaatgtagctccaagcgaccggggttttgtttcaggtagagagttcacaaaatccatcgtctataatttgtagttagcatcttcccatccgtccctaaaccggccgtttagaagtcgatcatacaatgtcgctgtagactgtctccataatctctctgggcggcttcccaaagatctcagtgatcagtttgaagtgatgcacattgtcccttgccggtaagaagacctttcctaggagcatctctgccagaatgcaaccagtgctccaaatatccaccccgtaggtgtatctctgccaggtcaacatgatctctggagctcggtagtatcgtgtggagacatagccagtcatctgatgatcttgttctcgagctagaccaaagtcacaaatcttcaagtcgcagttctctgtgatcaaaatgttgctaggtttgacatcacggtgaatgacaccagcagagtgaatgaattttaaccctcgctgaaatagtcagatacactgatatttctggatcactcaggcagacataccagcagttggtaggtgaagaactgggtgaacctgtcctccaatggctttgaccttgattggatcaaatgatgaaggtctgtcatgcaacaatccatcacaatataactattccaacatggttagtatgattgaaggagatagacaagtgatttccgtacagatcttccgctggcgagatgaagatgtccgtcatgttgatcaactattggcgattagtgttgtagctcatacttcgtctcttttctacacatacattatcatgttttaggttgttcatcaaatgaacctcgcgatatgtgcgtttgacccgggaagagctttcaaagggtttccctatcttttttatggccatcgttcggttggccattgaatcatgcgccgagctgatactggtggttagtggtcttacagcacgaatagaatatacgagggagataccagattaccccaaacgcaccaacacctcgtgctttcaagtctgtgtatctctcggtagtttgaagggtggtgcccatgattttatgtgtgatgaatgtagccatgcttgcaaggttgcatgtgtgaaagttgaatggattgacggaatagtgtaagaggacaaaggatccccggtatactataaacgataccgcattactataattagtcttccaagatcccaatgttcttcttcccaggtctaggccgtgtggtcgttacgtcacaacgtggatgttcccatgtggttgatccattgtggttggccagttggccgttttacatcttgatttccacgtatccatgccgagccggttataacggattatcatctacatagtatatatgctcaaagtagtggacgtcacctagctcgatcccaatcaccagactctctttcgcaattgcgtcaatcatgtcccaggtgatcgaacgcgagaggcaaattacgatctttgccttcgaatttcctttgctgctcggtacaaaatgaacaatgcctttctagaagtccagaataattggaaatttaacggaaccattggtacttcaattgaaatagagcataaatgtaccttgtatcgcattaacaaattgcagctaagctcaaatctaacgccaaacaccgaatactataccgaaagttccccgagccagtaaagcccacccattgatccgtccttgacggtccgagtgaatcagagcaactggtgtccagcatcctcgttgctaattacgctacccacgtcagaccatgccggagtagccaaaccaccaacagatcgcccatcaaggtcactaagagtgccatctgacgtttcatcttcaaatcctccgacatggctgaaacttccagcggtcgaaggagcggccgaaatctcatcgtaggactgaacgctctcgtggccgaaaccatctagctcgacaagatgatcactttcataatttatattgtttgccgcatcagggtgcgcataatatacctgctgatggtcttctgtgtggctggaaccagaggcagacaagggagagttaggagagaatggatcgaaaaggttatccccctcgggtgcttcagaccgaggcgtaaactggatcatagattcgcaaggatggattgagggagcgggtgaggggatgtcgacatgcagctgattccgacccggtgtagttgaggattcggcctcagttttcttgacacctcggcggaaaggctccgaagtccccaggtcaactcccgttgagttagcagtaaattcttcgttggaccgagcattgtattcgtggtctttttgtatacgcagattgccctcgctgtcgacgagggtatcaaagctattatgaggctggcctggctggctggacttccgtcgcgattcaatgagctttccccgtcgtattatctcctcacgagcaatccgtctgcgttcttcggcaacctcgccggtctcctcagtcatggaaatgtcttgccgcaacgctatgtcttgaggttggatctcatcgccgaggttgtgcagagccaaggcgatcttgcgccgcgagttggttacccattgttgaaactgaggcgactcatacacggcgatgccagctgctacaagcacagaaacagtaatgatgattcctgcatgagagtttagcctcatcgtatagagagtggggaactgataaggccgagtacacggctcggatgatccgggagggaaatgtagaagtttagggaggtagaggaccataccttttgcaagtggtgctggcataatgaacccgaatactgtacttgtctttcctaaaagtgttttcgaaactcaccaccgtcaagcggagcaagatgattcggtgatggatgcctggaccttatccttgcattatcgcgcgtgaccgggaaagcccttatcattggccctaagtacacaccgctttgggtaaagttccccgcgtcaaagagggacgtgattgcaagctcccatctcttgactcgattgatgtacaattgaacttgaacgatacatcatgtctcgccaattttcgcaggcccaacggccgttgtccctcaccgaggagcttgaaaaattggaacagtccatcacccttacaatgcaaggtagggtagagaagtaaacaaaacagtccagcagaccgctcatcgtcctatcttcgaacagagatcgaccacaatttcagtgaagctcatcggatagtcactacgagtatactgcctctggtacagcaatataccgagcattcacgagatgtctgggaaggttccaaggttagcgccaccagcttatacagctatagacagattggttgactccctttagttttggaagcaattcttcgaagctagtgccaacgtatccctatccggctacgaagaaagaaacaccgatgaagaaacgacgcaggaccctacagccacggaggaagagttgtccgccgacataactcaaagtaccaccctcgacgagacaatgtccaacgagacaccatcttcgcagcggcatgaaacaccccgccgcgatcaggcagacgatcttgatctaacagaactcggcatttcttcgcacagcactccgcgtgctccgggcggccaccaccaggccgacgacgacataacaacctcctcaatggagtactcgtcctcttacgagaacctaagaagacaagtcaatgaatccgaacccccattcgacctcccagagtcctcgaccctcccatccactccaggccgccagctcttcttcccacgcggcgtctccgtcacaaccccgatgtcatcaccattccttccacccgcggagccatccacccaagaccgtcgataccagaagacctcagacccggtactgcaccaaatgctcgacaagacataccgggtgcaagccacgccgctcggaaagggatttcgcaatgtgggtggcggcacgaacacccgaccaaagttcaacatcaccccaaagccggccgagtctacctccaagtacagatatgacgactcgccgatttccagtccagagccagaggcaccacagctccactcggaagtcttctcatcccccatcaagggcatcgataccccgggcacgaaccgcaagcgacggactagcagtaatcgcatgcgcggtattcccaggcctggcatgagtgttttgacacctgctaagaagtctgctggtaagtcagctatgtgggatagtgacgacgatctggattacgacgatgaggaccttgggccgagtcctcccaagacaatgcagtttcacattccgcagagccggttgatgcgaacgcctggtaataaatcacttgatcctatgtttaatactatatccatgctaacccccttcgtcttggtagcaagagaggcttctaagcgcattgtgaccgatttgctggccacggctggagctggggagattacagatgactttagcgacgatcaaagtccaagtgtgatccgccgcatggagcacttggaggatgaaactttctaaattcgccaagaaataaggctgactataggttcttcacattgaatatgcatggctttttttcggctacattccccacattacacgaatacccatgaatattactatgacgtcattattgacgaatgccagattcagtcttcagatatctattagagtagagaaacagagataagagggcacatcctttagtataatcacacaagtagacacagtaaaataaatgtcactttttggactgagagagcccttgcggcatgaacaagaagaaaaaacgcttaagaaatcatgtacgggggggatgaaggtcaagcgagcaatgtcatcgccccgtcccatctatcattatggtccaacagaggttgcgggctctcagtatgaaatagaaagaaaatgggcagcgatgtccgcgatggaccttggccaatggtggtcatggaggggatgaacaagaagcaagatagtgcatctaggagctcttcttcttgttcttggactcggtgtcctccttctccgtcttggagtccttctcatcattactctcctcaggcttcttcttttgttcgtcttcagcagccttctgcttctcttcatgctcatagagagaaatgtgcttagagctcaagcgatcctcctcagcagcaaccatatccttccagagatctccctcattattcgaggcaccctggtgggtaggctgatcctcctcaacatcctcaaaccgaggcttgcccgacggattcgccttgttcttcgcgtccagcaagccacggccgcgacgctgatccgagatctcaaacgcagccgaagcgcacagcacacccagcgtcagaccctgggcatagacacgagcctggacgagcttctgctggccgctgaggccgggaatgcgaccgaccagggcgaatgagccaaccatcgaggcgagccaggtggcggtgataatcttgtatttctcacggcgggcgaaggcagccgcgcggtcggtgaagctgagtccgcgggattcctcggcgcggaggcgctcttcgcgattctcgtaccatttgtatgcggcattctgctcgttctcgtattcgcgcgaggcgtggtcggccgcgatgataccggcgaaagtacccgaggacgtcaccaggaaggccttcatggggacggttaggttgttgattgtgtgatagcgacgtgaagcaagtaggacacctgctattccggcggcgagacccagcacgccaccgactgtgccgcctttgaggacggagctattggggggttatcagtatgggctgttcatgggaagaggttgcagggctttcgtaccggtagtgggcagcttcttcttctttagtaaggatcttcattgtgtaaaatagtgtatttctttagaatgaagtaaaggaagaaggtgaaatgttcgatataaaaccaaaaaagcaaaggccggatcgcatgacgtgggatcgcgggatctgctctttttccggcgttggcccccggccatcactcggtcttgcacggaactgacttgccttgattttgtggctttttttggctttttttcttttctgacctatttagaatttaattggcttctcattggctgtttccaatatgaatttcaattgataaagattctgcttattccactcggaatgcgaaacgtgacacactcccaaatccctggccccgattgatcccgaaacgcccaaacaccgcaaatagtatctcacataacggaacaggccactgccattttgaaaagaatttactggtaccaaatctaccgacgagacgccttgcgtgcggcgacctggcgggcttgcatcttgcggaaacggtcctcgccactggcacccaaggggcgcgcaaactgactctcgcgcacagctgtctggcgcggaaccacagtatagctgacgtttgtacgatcgacgcgagcacgattgagaaggcggggagggagcatctcgagggcgcgggcttcggctcggatctcctcggcggtgggaggtgcgcgcctgacgactttcctataggggtgttagtgcgtgatagggcggttgtaaaacagtgaacatacgtaggatcataatcagcctcctggtagacccgcttagaataatcgtcgctgcgctgcagaataggtcgtgtccactccgctagcaacttctctgccatttccttgatgcgacgctcggtgcgcttgctcttggtgtagaaaacaaccacttttccaatgccactggcaatcaaggcatccttgttgataggaagtttggtaatggcggtcaataggtcgcgctggatgttgtaggcgggcatcgcgccatcgtccagaggctcgaggaagaatcgaacggcttctagtaagttaatctctggatcgaccaaggcgcttgtgtactggttgcgattgaggagcatgatgacttcagggagcagcttaagcttgtgcatagccggttttccttcttggcggtttatcgcatccatttgcgctgcgtgggtcatgcgcttgcgcatatcctcaatttcagcatctgccatagattccaaatcctaatatgacagtcagtaaacgtaggtgggtacctgtcaccaggcgcaacacatacaatgccgtcctgcttgcggaaacgtctcttcgccggctttttcatcgcctcgtccatagcacggtcaagggctcgccgacgtcctgatgattgaaaaccagttagtacaaattgtgtgcggcgggaaaggagttgccagtaaagagtagcacatacgggtctccgggtcaagggtctcctcgtctgtctctggcttatcctcgcgctgcttgcgctcacgccggcgagatgagcctccttcgtcgcctccctcatcagctcgacggctctttttctcgcgacggccctccttccggcgcggacgactctccccatcctcagtgcgcttgcgcttgtgacgaccaatgagtttcaagttatcttcatcaatagcaagttgcgggcggtcctcgacatcgacattctctgggtcgaagttgtcgaattgtgcctcgtcaacctcggataaaatagactcgtcgtctgaaagtttgtcgtcgtcgacttcgtcgtcatctccaccgtgtagctcttcatcggcattcaccgtgacctccttagtctcagcagtaggttcagtgacgttctcgccctcgttgtcgccaccagtaaccggggttgcggcttgttcgaggacttcgggttcgggagaggcggcaggcgagacagccttgcggtccggtgaagcagacatagcggttcagatggcaccagaagcgaaggggtagattaagaacaaagattcaaaggcgtagaaatcagttaggggggtatcaaacaggtccagtacgttatctgcctaagtgatcccgacggttctccgcaaaatcaaccggttttctgcggattggaccaattcagatgcggtgtggatgtagggattgaagagaggagccaacaagctgctcacagaattagtcgatagaatgtaaatggatagagagaggggagacagtgaggcaaaacctcaagagaaggagagcggtggtctgtgctcccgtgatttatttctccagtccgacttggacatcctcgtaactacaactctcacaacatctattatctgaactctctttcgttccttacttctttatcatattcaaaatgtttgcaccgggtatgttcccagttgtatatctcttcgctctagcacactcgaactaacaatataactctctaaggccaagaacagatctctaaggaagagctcaaggtcagtttcaagccatgacctctgccctaaatagcatctgatactaatattatttacaggctggtgagattgaggccttccagaccgtccagatggctattgccggtggtttcctcctctacctgtgtaagtcgagtatctgaagccttgaacacctcgagacgagtcagaaaagagttggggctgaaaactaacattgtcatctaatatatagcccccttcgccgtcgaattcgtccgcaagttcctttaagccggttggcccgtcttccgctcctctttcttgctcttcccggactgtaatcgacgaatcgctggttatgatttcccgatgatatgcaggagaattgaacatttcattctttcccctctggcatagctttttctactgcccaaatcggacaggattgagcatgggcacctaattcatggaaagctcttgaagctcatatactacacattttgggtctgctgggcagtgtcagttggatgatgtattactattgtgcataggctcgttgtcatttgtggtttatgagatatagagcaaatcaaaataagatattgcattatatcggaatctaggtctcgcctggctgtggcaaagtaatgagtcaacatagcagagtgggggagcggtttaaggcatagatatacactgactagggactatctgtggatagtacatgtcattacgaagacttggcgagcaatgctcattcaaagacacccaaaatggaatacggagtgttcagcaagaaatttgtattcagatatgcattacaatggcctgatccccgagaacgccggtaccccgatgaccgtagacattaagtccaaacatgtgaggaaatgtgaggaaattgagaatcaaaatagcacatagaaagtcatagagcaatgctctcaattgccaattgctttctccaccgcgttgaagtcgttcttgatggactccatctccttctgaagatactgaatctgagagtgataatcgtccaaaatctggtacatacggttagcgaactcttccgatactgaggtttcacaagctcgggactgccgaaccttctttgctgtcttcaatgtctgctcatcaatgtcatcctctggttgtgtcacgtttaccccggcacgatcgatttccacttgcaatcgcttggagtgttcgtggatggccaacatacgggcccaaatttcttcagcacggccattgagagacgggtcgaaaacggcacgttctaactcaacaagctttttcttcaactgttcctccgcttcatccatggcataccctctgttgcgaaggatctgtgtcttagccgcaagggagaggcaccgtttgctcagaatgatgtgtttccgacggcagtcggcgatcttgacggaaaggttgagatcatgcttcgagagaagcccggtcaagcaatcgttgatctcgtgcaggcgcgactgcatcatagtgaggaagtccctttgtcgctgcgcgcgcttaccgagttcccagaagcccttgacaagcacagggacatatcctggacccggtcgcttgcgcaaagcctcctcccactttgcatcatcgtcctcaggacccggttggtagaaaggagcggcctcctcgccgacattattgtacaggtaggcacggaatggcgagctttggctgggcgggtcccacttatctttgatgatggctacttgcataggaacagtccggtgcactagaaagtagtcttgtcagtaatggttcgtagtgaatgattacgcaataggctcacccccagtgatagcacgaccaggagaccaaaggcttgacgatagagaaggctgttgctgttggggttgtggggttgtcatcgtgttctggccgaattgcgattgctgctggccgaatgcatttgtttgttgttgcgggttcgaacccagaccaccaaaccctcctagtgcagctggttgttgtgcttgctgctggcctccggagaagaggctaccttgcggtttctgtagcgaggagccgaatgcgcttccttgctgctgctgctgttgttgctgaggcgcggcgcttgcgccgaacgcactcccgccaaatgcattggttgctgtcgcggctggctgttgttgggtctgcccgaatggtgtgctggtgttgggttgggctgcggttgtagaggtgccaaagagagacggcttcgctgcagtgttgccgaacatgttgttggcctggggctggtttccaccaaagagagacatgatggcaatcacaaagacaaaaaaaaaccacgatgaagagagaccgcgtcaatggatcaataaatcgctagcgcagctagattaagagcgctgaagggaaatagaaacaagttcaaagcacatagtctagagactggggggtgacagtcgaaggtgagaaagctgaggggttcttcgatggagctcgaaggccgagaaagatgagccggagctcgatttgtttgtgtcacgtgatgtgatattgttcgcaaaccgcttaaatgcatattgaaagaaagagttgaatcaatagtgaattagaattgctttattgttctatgttattgtcctaatggatttttcttattgatatatccaataaacaaaagcaacaactcatatacgccctattccagcaccgcacctaggcacctcaggtgatatattacgctgacctaagcaaaatccagacagccaatcaccgacgagccaaatttcattccaccgcaacccgcagctctcgactatcgatctccaagtctcgcctcaattgcacctctttcccctcacagtcgttctgacaagccaccgtcgccatggcccaaagagatgctcggtatgtaccttgatctcaattgcttcctctccgtatagctcaatgtgagacgctaactgctatcccctccgcgcacagcttcaaccagactgtcctggtggacaccacgcccatgcccgatcacattcccaaggtggaagagatcggtgccacatctgcacccctgatgagtgcatcctttttcattggagatcgctgcaaggccttcaatgacgactacatgaagtgcaaggacgaggccaatggccgcggggagatcgactgcttgaaggagggccggaaggtgacgcgctgtgccgctagcgtgtatgttgctttgtgatttacctttggatcgagaaggagatattgacccgtcacagcatcaaggacatcaacaccaactgcctcgaccagttcaaggcccactgggaatgtctcgagaacaacaaccaccacctatgggaatgccgtaggcccgagatgcagcttaacacctgtgtcttcgagaaattggtatgatatacgccttcttgctctcgatcgcctatcacctcgcatccattatatccgctatcactcccggactagagctaacatacacttctcttgtttctttagggcttgaagaagaccctccctggcgctcccgagaaccaggttcctgttcacttgcgccccaagcaaaaatacgcacagtaccccggtccccagtggtaaacactgtccctgtttactttgtcctctctagactcaccctgattgcacccttatccttccctctcataatctgggcaccgtcttttttctatagcactgttttatttggatgctcgaccgtaaatccggtctatgtttgtgtaaatatctcttggcatcatgaatggttacatgattttctgctcgatctccaaatctccttgccttgctcacatggcatgcacggggcaatatgttttccaacctattgcagtgtgcaatagcatattctcgagttggtaaagtacggactctatagcccgctggctctcgtgcaccctcggtttgatgcctgatttgttcactgagcgtgacctgaccgatccgacttgcttactgagcataaacccaataaaatacaacgcgataggcccgtccaatgcagtccttcatcaacgctcttgtccccttaacaaagggctggcgtcatctatgtggcggtccagccctggttgcttcgcctctaagtggaagggaaatgctgctatcccgcggctatggcactattcagtctcccatccacgataccgtttctacatagttgcaagaactatccagccctctggttctacgatatagacgtcaggccttttgctggatctgaagggtgaggtagaatactatggaactaccatattccaaggtttttgatcgagttctcagtacttgattcctggagcaacgagtgtataacggggatatacatgtacatttctacaaatcaagcccgtcaaccgatgtctagaaaacgacgcggtctacacacttaatcaatgactcgatgtatatatatctattcaggtctacattgttctttgcccttcaaattgccaaatttttctcactttattgtcaccctgttctcactttgttctcaatagacaacctcagcccgcccttctacagctatttatttcgctttcttccagttctcatatcttctttcacagacagccctctgtgatttttattccttgcatctacgctatgtccattgtttctctggcatatcgttcgccactttcttgaacagaagacttgacaagaatcctgactcctacgaagccctcgcagctcgcagtgacctcgttgagtctgccagacatccagaagatcatcggtctcacctggttgcagatgatgagttcgactttgttacacctgtccccgtcccgcaaggctcgatgtttggaaatatccagaagccccattacacctttggctcaagtgcctttgggcagccccagcagcaacaacagcagtatgttagctcgatggactgtacaaataaatcagctaccctcagttagaactctagttggaaaagccggaccgcactcatggcgcaaacgaagccagtatccgctgcaagctcgaactcctccttgtctgcgatcacgatctattttccatctttgaacaaatctgctcgacccttgaacattcaaatggaatgtacatgggcgtatagctctgcgaaatggaaggggaagacatcgacttaaacattgctatcatggagaccaagagacctaccagttgttccgcagggattccgcattcccatcccgacccattgctgctctggtccgaatatgattgacaggcaactgattgccatgaatgtcgatgatgagtgcctctcattgtcataccccggcggaacttgcgaagatgatgatgcccgatggtttcactgtatggcctcttatgggatcaacagcgagcttcaggaggccattatggattcaaaatttcgacacatccgcctaaccgaaacttgcaagctctggcttcaggacactattcacttacgataccgggctacaaccccctttaccacggaagaactggggcgggtcacaaggaggttacaaaacatggctctagagagctgagaaacagaaaatactggaggcttcactgtgctggcggcttcactgtgctggtggcttccattggagtacagaagccgtttgacaattccgaagccaagaggcaagaagcttctcgtgagcgtgatcttggcatggtatctaaaggcgatggaggcgtcccccatacacgcccagtcacacaccagggagggatctggggggttctctattccttgctcttcttatttttacccatggcccttcgctagtattacttgatcgaaatacgagtctatctatctaggctatgacccaattaatagatagtgagacaaattctctgcttctttgatatcctaacccgtagcccaaaatctgaaaggagtcggcagatgacagagtattatgctcttttgggtctggactgagcgtgctaggttaggaaacccatatgtaggtaaccattgcaacaaataaactagccacctttcaccctgacattcctctgcaggaaagcttgtatatattggctctagattacccaggcttacgcatgcactgcagagtctcaccgtgtatataacatgttctggctatgttttccttccgatctctgactttgtccaacatatgaccaccgagtaatatgggtttttgttcttgagagctaacttaacctttagagaattggtgatagtatacatgtaggcagcgtgcgtgaaacataaaggttaggtgggatataagttcgcttattcctaacgtatctatggataatattgctgggcatatcaagctctataattctattacgattagctttgagtagatctgatctaatgataccttctcaaaatattgatctggaccgagcgcttttccgggctagtacaaaggcttagcatcaaccgttctgcagcgtctgaactacaatgacagattgttaatcgttacattctataatccgaaggaatccataatcataatcatccttcacctgattcgattgcaggggtttggcctgttggtcaatgtgtgtaattgagccctaattccggccctccgatatactacctggtgtaactatgcctttgagataatccgaaacatatctaggttggtttctacttaggttcaagagtccgcttgtcacagaatgcatcaacagcattgactggtcattggagtgtatctgaagtatttcggaatatagaaagcatgtattaaatccggggatttagacccaaggtatgaggaaattacaaagagagagaggccaagagtacgcttagatctagatgcacgaatagcggacctccggcatctatctatagatacctcgagaggcataaatgcaggtatcaaactctccaccagtccgtgcatgtgcgacaggaaaacaaggatatagattattgatacaaaagccgcacttccttctctaacgactcttcatatcgatgtactacttacatctatagtctgagccatacacgcaggtagacatgaagtcggcaatattcttgattctatcattatggagaggtgtccatcacgtccaagcagcggccgtgttcgcccacttcatggtaaagcccttcaactacgatctatatctccgctaacctccaccaattccagctatacaactcggagaacttcacggtctccgactgggaaatcaacatagcagaagcacaaaaggcccacatcgacgcctttgccctgaacatcgcatacaacttcccaacaaacgaccggtccctagcgaacgcattcaaggccgcaaaaaccctgagcttccaactcctattctcatttgactacgtaggcaacggcgcctggccagaaggcgaggtgatcggcctcctccgaaaatacggaaacaacccagcctactaccagcacaacggcaaacccttcgtctcaacctttgaaggctcctccaacgccacagactggaccacaataaaaaggtacacagactgtttcttcgtaccggggtggtcagccctaggcgcgaaggaagctctcgccgtcgcaccaggcattccagacggcctattctcctgggccgcatggccggaaggcccagacccgataaacacgtacatagattccacgtacatgcagtggctcaaagacaccggccacctgccgtacatgatgccagtctcgccgtggttctacacgaacctgccaggctacggcaagaactgggtctggaacggcgataacctgtggtacgaccgctggcagcaagtgctatctctcaagccggagtttgtggagatcatctcgtggaacgactacggcgaatcgcactacatcggcccgctgcatgagggttcatatgcgaccttcgagatcggtcatgcgagctacaactacgctaccggacacccccatgacggctggcgtgacttcctgcctttcatcatcgatgtctataagggtgcacggccgaatgtcacgactgagggcgtcacggcttggttccggctggcgcctgggaaggcttgtgccaacggtgacactatgggtaatacgaagacgcatgggcaaaaggagttcccgccgacggacgttttgcaagatgaggtcttctactctgcgctgctccggaacgctatggatgtggatgtgtcggttgggatcggcggggtcgtgcaggatgggaagtggaagaatagaccacacggtcccatcggtatttatcatggcagcgtgccgttcgacggtaataccggacaagttatcgtgacagtttctcgtcagggaaagactgtcgccgagatgcggggtgcatcgatctcggaatcgtgtccggatgatatccagaactggaatgcctgggttggcacgaaattcgccaataatacgatttcacgtccgccgccttcgccggctccgactgaggtttctgcggcttcggctcttctggcgctatggaggatcccgtttgcgattgtctttgtggccttggttgcgactatggtggctgcgacggcgacgcctgttcagcatgagaaattggctctgacgatcccgatttcggaaggttctccgtcggtatatagtgctggtgcgggcgatgacgatcctagaagtctatatagccatggcacgagctatggtttatatccaatcaacgggtatactcgcacaacgacaacgggtgctctaattacgccttttaccccaactggtgccacggctttcacatacagcacatcttggaatttgaactgatctgagaacagcagtggatctcaattatcactaatgatgttgaggaataatactggcgatctaagatacgactatatatcgaggttgaccgttaggtagttatttcttagggctttgaattgtcatcaaatctatgtaatctctcaacgaaagaggacagcaacgtggtgaataacttgactaatgaatatgacttctaatagggtacatgccaaatgatatcaaaacaaaataggaaataaaagtacattgatcatctatgcttggaatgtaagcccttccccccaatccatagcatctagactgatgttcgcatctatcaataactcgatatagttaacctcaagtgctgtcaccttggacacagcatgtatcagacacccaagaaaagaaagtcgaagacaacagaagcaaaagaggagggactcccgaaacctgaaattgaaacccatatatactagacaaaagaaaagtcaagagaagtagacacaagaaagtaaacgaggagataagggaatagccaatgcaaacaatgcccggagaaaaatgctgcaaggagtcaaagaccgataaaaagaaaatggaaagaaagataggccacgaccatggccatggccatagaacgccctttatggcaataaaggcgcatccacgatcctcaggagcttaagcctcgccttaaccgccgcccagcccgtcttaagtcgattctcaacacgacgatcccccctcaaccgcatccaaataagcagcatgcccagcatggcaatatcaaacaagatctgccgcacagcaacccaaatcatccacttcacccacgctaacagaccagatcgacggcgatgcgcaatagaccgagcttccatctgctcgcgcacagccgcaatctccgctgtcattttcgtcaaggcctgctcgacacggcggcgccagcgactgtctttcgaagctggctctgaatgggaatgtcgactatgcgggagaccgttcccactgctgtctatactaataccagaggcaggattgcgacgatgtttgggacggtgatgtgaagagacgtcggtatgtgtatgtgtgtcggtgttggagtgggagctagcatggtccgggtcatcgtgatcgtggtcgtcttgatctcgttcttcgtataagctatcacgggcttcctcaaactcctcctcatcctcatcctcgtcctcattatgcggactcccatccttatggttctcatcagaccccctccgccgccgataatactcctcctcctccggctggctcataggactgagaacccgtaaccgcgagtcccgatctcgtcgactggtatcatcccgtcgatcaggacgatcatagtcctcctccgccattcgacccgcgatactcccatacgcactgcgcgataacggcgggacgccgactgtattcaccggactagaagtcgacgacgacgaggtgttgaacttaatctggtcccaaacgaattcgagctcggcgactagctcgcgtgcttcgggtgtttgggatgcatattggtgcatggtgtggatcagcgtcgagatgtacctgcgtttggcttcggtgcgcgatatgtcgcgctgcgcataccatgcatccctagacaagacaagaacattgtcagtgtgtgtggtgtcggattgtagagcgaaaagcgatgtttcatagacccgagcaagatccacaataatcaaaagctttctttttccccgcgcttcgggacataccatttctcgcactccgcgtgcacctccggcgtgttcccaatcggacgatccattactccctccacgtccccctctgatgcagtattagctcctccggtttcctcgttgttgttccaggtgtaatgccggacactcacccatactctgcttatacaagccatatagtgccaaccgctcggcagcgggaggtcgcgcggtgccggtccggggaatcctcttaacggtattgagggcatgaacaaagactcggtctgtgatgagcgggtgtcagtggaaatccggatgcatgacgcagggcgcaatctgcacaacacgcacctacagagtccgacatgacgcgataagcggtccggtttgccctgtcttcatgggagcggggttgggcatcggcttgcgcgggtcctcatggggagcgtagaagactgtaaataggaatttggtgatacagcgaggttttttggttcttcaagagagatgctggaagggggtgtgtttggtgaagagggattgtgtccgatcggagattcccgaggttccctggtttgactgtgattttccccggaatgtggtcttcgtttcttccccggattgaaaaagattcactccaatcaaaatgtggaaagaaactcccaggagatgatctggagatggcgtgtgttggaccgcggctctcggcgatcattaggcacttgtgattgtcgccgaaatcgcattcgacattctacgataattgcacttttataagttgaattgtttctttgttcttatttcttaatcgtgtatagtaacaataaaatacaaatgaagaccctttactcgctcggtaacctcttcatcgtctgcaacggtttctccgcatccactggcgtacccgtcatcaactcggtggcggcgcgcgcctcgtcaccgctaatcggaggtccagtaaagtgcttgcgcgcataggcaaagtaccagatgacactaatagcaccgaatccagcgaaaacagcactggcataattcatagactccggggtaacaggcaaggtaacgggcatgcagaagagagcgacagccagcacgatccacgcaatggtaacgcagttgatggcgaatccaaagcgaccgagagagaacgaggaattcttcacgtcttggcggcctcgaatcaaagagatcaaaatcgggagaccgtacgaggtcgacagacagatagtagccacaccggtgaaggagttgaacgcagccgtggaaccaaaatagatcagtcctagcaatccatccacgacggccgatagcacgatagcccacacaggcacatccagcttggtgttcacctgccgccagagcgtgaagcccggaatggcgccgtcgcgagcgaacgcatacgtgcagcgactggcagctgtgagagacccgatgccggcgaacatcatgatccccagaatcaggaagagtaagccgaagccaccgcctgcagaaccggtcactgtcttaaagagcaggccgatcggctggccgctggcgacctcgcgcagcatctgcacgttgggcatcacgaacagaatcgggatcaagtagaacaggccggtgatgccagcagccaccacggatagcacgattgccttgggcacctcgcggtgtgggttctgcacctcttcgcacatggcagcgaccattccgtagccggtcagggtgtatgccgcctgcagcaaacccacgaagaaagcccatccagcgggccagccgctcgtagaggagtcgtagtgagcgaagacaaagtcagcgtctctgcggttgtcggccattgtcaaaagcgtgacaaggataatgatgacactggctgcggtccagaagatgcagaccttgttgatgagatcgagataacgcgagaaaaagatgttgactagggcgcagacgagcatgactgcccagaacatcaatacggtctgccacgcattggcaacgaaggactcattgaagatggagatggcgctgaggatcaattggccgccggagaagatgatactcagtgtgacggtccaattgcccacgagggttagccagccgtcgatgaaggacatcaatggggcccagcgacgcgttgagagcatcgcgctccagtagtacacgcctcctgctgttgggtaaacggcgcagatctcggcgagagaggcggcgatggcgattgagatcagggagacgaagacccaaccccagagtatggtgacggatagaccgtcggagagggtgatgtagagggtcgtgctcagtccgaagggagctgccatgatggcaaaggataagccgaggatgctcagcatgctcaggtttcgaggcaattcactcttgtagcccatacgggccaatgcctcgtcggcggaggcatcgacagaagaacttcgcatgatgaatgtgttgggagaatgagcattccagtaagcaaggttgtcagttgatattatacctaaaacgagattaagaaagcgccccgcatagaaaacatggcgcggtccgagaccgcgtaacaaggttttagagatgaggcgaaaaaaaagatatctcgaacgaatgacagggattttttaggcttatctcgttgtatctttgtcctgggctgctaagaaaaggttgtatgacctaatggtcctacgataagagacggcatcatgatccacttggattcccctattttattcagacgcattcatcacgatatcacgatatcagatagcacatatatcacgtgagaatgcccctggatatacctcgcatcttaatcccatccatctcaaccctagacctggcacgcaagaaggcagagatgtggaacacgttggacaccataagaagatctacagcggggttccgtgccaagcatattctagcaccatgagtgcaagatcaagaacctgaatgggaggagaacacatctacagatcgtattgcctatgcacacggctcactaaggcactgactactttatacaacccaccaacgtaccaagaaggcattctaatgcgggggctgggatgaggacactggtggtgtggggaaggttgggtttcaaaggggacacttgcgattgacagattcggccggaagaggaaagtggtaccgaactagtccgtaaggagaagagaaatgcgagaatcctactcagctacggagaactcctactcaatacagtctacactggaaatggaatatttgaatgattcattgcacatacatcaaggtcacgcgaggtgacggctgccacatcaggaacatgctgcgaagactccatgcaagaaagagactgagcaatcgatgagcgccaggatggatatatcaacacaaaggaaggggggaagtagttcaaaaggtgaagtccggatccacacccttccttcggaatttggagggcagggtaaagggggtatcaaagtgggtaaagcacaaatgtcatccagtgatctcgctgggcagaagaaaaggaatttttttcttgtttgatgagatatctaatagaacaaacagggagatcagtaggggagggaaaggagtaagggcggaagtaggccctggatggtaaggccctgagtgttgaaaagggcgagagaaagatcgagatgggaaaaggctgtcgggatttttcggccgcaaaagaaccgtgcaagttgaactccgtctatgtgaccactctagtagtcaagtaggtcagtcggaccgccttttccgacatgtcacgttgaaagaagggaaataatgatcgaaagaaacgaaatgcgctgagtcgtgaccagccagctagtgccaactccaaatcgtaaaaaaaaaatgaccgtggtaacggaacgatcgtcagtcgaggtcggatgaaataacaagaaaacgcccattcatgcagtgtcgtcagtccggtgaagtcgttacatgagatgcaaatacagtcgcagaggtaaacagaggcaaacgcgagtttaaaagggtcagaaaggtgacgaggccggtgacgaggccaacatctatggactcagtccgaggtcatcattcaagtcagggccaaagccggccatatcgacagagtgcaaggatccaggtcccttgcccagggagatgtcggaggatgcatagtcatgtttgagtcgttcgtgtggtccgaagatatgcggtccgaagaacggtcggttctcgtcatttggagtgttgccatccccgccgacccacggcccgttctgccagaagcgggtattcgcttgctgatctccgaacagatcgtggtggtccgggtgaggatctgggccatggatggggaactcgtttggcgactgaaatcgtagatgcgaccgaccgaaactggagcatggagaatcggcgtggagcggcatgtcgagacccgagagaagggggggatcctccaccggggtgatgtcaatcgtcggattttctgtttgctgtgccagagccgccgacaaccggagattggaggatgaactttgccggctgtgagtagtcgatcgctcaattgcacgctgcacgaagctaccacaggccttcaagaccttttcttgatgctccggtgacagattgttgaagaaatcgttcgacagggatggcttgggcgggtcgtctgctgcaggaactaatccgtaggtagcctttgcgtattcggagagacccgacggcatattatagggagactggtaaacattgggtgctagcgaccgttgctgatccaggtaggcatattttccaggcatcttagcagcagccacgctaccccgatcaacggtctcctgcttgataccctccgactctttcctctgaataacatcgagtcgctcgcggtggctgactagcgaaaagcggagcatctgaaggagtcgagtgacctcctccgaccgcatgttcagagtctgaggcggcaacagagtgccatccgccgcccggggctgaacccgttgctgagccatggccagttccagcttctcgaggccattggcgggtggtattgagcccatcggacccaacagcgtctccaccaccaattcggggctgacgatagtgtatccggcaaagacattagcgtggtcggtaatttgggctaaccggcggcgagcaataagttctcggacattggcaaaggtattggtgggtgggaggtgatgctgctgctgagcgtgcgacttggcgaccgaaggatagggggcatgacgggcagactgattgggcagagttcgaaaggccgacggcatcgcaggagcaccagcagcagcaccggtaacagggataaaaggagggggaggggcgaggtgctgcaaggcagaagagggcggtcgggattgtaggtgaggggcgttgacattcgaagagtaaatattttgcttctgatgctggttttgctggtttggctgattcaggtttcggtagggaggggcaggggcggtggcagcataatgaaagtggtggggtgagatcttcgatgcacgagcgctgacacccatgccaagcgacttgacgctgtccaggaaattggcccgaggattgtggatggacacgctagggttgtgtgtatactgtgccctactttcggtggactgcatgcccaaataataccacatctgctctccctggaggttgaccgtcctgagtggggcgaattgattcctagtcgcatccactgtctcaaattcagcccactgatagggagatcgtgaatcgccgaatgcactgcctgccgccggtaccgctgattctaactcctttcgctgttcgggttttcgcgctaggtgggctgggaggggttggattcctagtgcgagaggcgtgaaattgctcttgcgaacaacaagcatccagcgatagggcatttcaatcacatctctgtagatttattagtgtgagcagaacgtcagataggggccggaaaaaaaaaaaaaaacttaccctctggggagcaccttgagcaaaagacttcgctccgaaggacgattttcaagaacaatggcgccattaatctccttgtcggcttgaaattggatcaaatttccttgcaccagacgacgagccgattcgattacccgacgatccacatcggacgattcacccaggactccattaggccgcttctggcgatggaacttgcattttaaatccacacttggaatggagtactgcgtgccatcatcggcaatgacagcaatcgcaccgtgctcaacctgaacacccgccaaaagagcacaggttgcatgataagcgcgcgtgcattttccaaagttacactggaagcaggccccgcggacttcgcggcaaaagagacatttaagacccaggcgagccttggggattttgtcaatgtcacacacaacttccgtaccagatgcgtcacggagaattgtggtctcttctatgaacgccgcacaccgtctatgcgcatgccctttgccatcttcggtcggcagaagatcctcatagtccagattgttagggcatagcaagcacgggagcttccgtggtccttctgggtggagtttgggtcgtttggtattcggcccgtcgcctggattcttccgttttcggccacgagtggatgtcttcccaggcacactacgtggcggtgtaagaagatcagaagcgccttcaaagccatcgaattcgctctcaaattcaccatagtactcaggtgtgctctcgccgcgcagcttgcgctcgatctcgtccacatcgatccagacactgtctgcttcgcagttgcacttcttcgcgatgcgagcatagtctaaccattgctcggtcgcgaagttgaccgactcggcgcaattgtatccgacgttatacccagagtggtacccgtaaggaaatgtaatcacaaattctccttcgtaatgaaccaaccgattgacggtgatcccatactgcgatttgagaaggctaggcgagacgaggtaggttttgtgacgaaggaattgatcgcagttcttcgcatcactggaccagatactgcgcatgacctgttcgaagcgaggtgcatcttcttgggagatgctgtaccactgcttgggggcaccgaagtggatgtagttaatgctgtacagatctacatcctcaagatgccaagcaaaggtagccttccacatgcccatgtagagataagcagtgttgactccaggtaccttctgcccgaggacgtcaagcagattcggcaacttggcgacattccagatttctgtagaatcctcgaagagcgaaccgggcatgtcagctccgtacatcggattgttatacatgagtgacttccagtaattagtctcaagctcctcgcatctttccgcggtgtattcttcatggtcatggatccggtaatcaaatcctgtgtacgcctcctcatcggcttgatcaatggcatcgcctcggttgttctttcggcgtgcggtcacggacttgggttgtcgtccctttggttttatggtaggtagagattcgccttcacttaaatcctcggtcttcggctgcacggggttggtctcgggtgatacaggcgttgggggaccctctaatctggtcttctcgacgtcatctgcaggaggctcctctttgactttggcctgatttgaccgtttaggggggcggccaggccggcgcttctgaccctcggggcggatagacggggcccgtggtgtcggggccgcacggttcacgcgttcttggtttcggcgtctctctcctcggcgagccgggggttggtggctgctttcttcacatagacccttccactgaggaaggttgtacgagcgttggcgttcgatgttggcttgggtgtatgtaccgtgggatccgtggaactcttgcatgatgggattcttcactcggattttcttgactgcctcatccagcggtggaagagagtcggaccttgaaaagtacaaagtcatgagcacagccatccacattggtcttcatttgatcgactcaccattctttcggaggaatgactttcacgatgcctgcctgcattccatatttattgattttgttgatgaagccctggaagtctcggaattggtccatcgtctaaaacaataccacagtcagcctggctctggaggtataggcgttactgcccagtctcacacaactgggagatctccaacccttggtcatcgagcaggagggcagtggcgtggaactcaccggcttgaaaacagggaccttgccgccgccatagtaatgatcaggctcaatttcttcaatttcctcaaccttctcctccacttcttcctgcttgatcttagatgtatcgggtgccggggcagattggtggtcaagctcgagatccgataactcggagggcactccttcaggcgcttcctttttgccgttggcactctgcggcggagtgatggagatttcaacgacaggttcgcctccgagcgagtcgcgctgcgactgatcgagtactgtcgccatcatcgagggcgatagaggaatgtttgggaaacggtacagcgtatgagttgccgtcgtcggatagtgcgaccgctgatcgacggcgtgaagggagtatttcccagcggtcggggaaatgggaacaagcgctgcgaccgagcgaaaggaagcgcgaaattgttggggtcaagggcaccagtattggtgtgttgagggtggtcgacacactccttgagtgtacagagtacaacggaggtaggtagttgaaacgattgcgataagctagctcttcgcgggtggttgtttttgcctaaactgaacagaaaggcgaactgttttagtcaggtcaccagtgaaagactgaaatttgtgagacaggaagttgtagtgtaggcagaggaaacccttgtacggagtagcaaaggcagcgctaggttctccatgaaaaaggtagagaagtgcagcaataccagaaatagaccaatcatgcaggtgccggcgacgcttgaaggtggagtgcacgatgggctgatactggaaggaggcaggggcaggtgggcacagggtgaggaatgatgggcttgaaattggacaaatcagagcgctaatatgggaagggtgggaatcgtccgatcagagagcaaagtggacttcggggcgactttggcctgggcgcctaggagccgcgaaatgattcgtaccgtatccggtctcggacgggtaaaaggattgccaggtctcaggggagtacaagttgatcgcaaacaaattcaaactcactaaatcactggaacggcagttaacgcctgcgaatccaaagaaatgcaaagaagcgcagaagcaaaggtggtatcacgatggtcaaaatagagcttggtcatagcaccttgaagctttcagtgatgggtcacgtgacaaggatgtaatttaagattatgtgatctccatgttctggatctgttattttaccgttatttactcaatttcgtactgtccaacaagtttggtattgtcacggatcatacaatgttcagccaatctcggataccatcggagccgagcgtttcctcccttgatgagatcagtgatcaacatcaagattaactgcatgtatacagtccaggacttatatcctagaacatatgggcagtataagttctagttattcttgcatcctctatttcttctatgttataagtgctgaattgtcttataacttggcgattttttctccgtatacggacggagtacatccatccatacttaggctagaactctctatattaatcaagcgagacctccgaggctggtatacaatctacactctctccgtaatatcttctagcattatcattacagggtaatctcatcttcttctcgccatgatcatatactaatccgggaaaataaaggtccggtcggatgaggctctagtggctagccagttcgttcactttatgtacctacatcatgcggtagataactatatgtgtctaccggggaaatatgacgtatattcagaagtgtacagcatacaatgtacaactcagacatgtactccgtacatcactttgtattatccatgtaaacaaaaatacataagagtggaccgtgttggtccttctttggaaattgaattgtagatctgtggatgcatgaacggtccgttgtcaggatctccaaaatctaatattagttagagcattgaggtcatcgaggcgcttggatcactctctgcatgatcacatccatgctgtatctatttgaaactattgcacccattcatcgaaaagctgggtatccaaattaatatatccatcgacaaccttcaatccccgcaggcgttcctgttcaatccgctcccaggtccactctgcgacatcccacgagtcagtattctccttctgctgcttatccagtgtctcctggctcggaatctgctcatcgtttatcttcaatacctcccgagccaacgatccatccacgcctcccatggccgtgataccttcaccactagcaggggtgccaacgtcggaagcttcggctgaggaattgacgtcggctagcgcggtcttgtcttcactcccggaggacggcgcgggaaggaatccgctagcgcgtagaagccgctccgggggaacagtcagccggcccttcttgaccacgtacttgctaagacccacagcaaggaccaccttttcgccgccactgtggcttgcaggtcgcatgaagcaggtcaagatgtacatccacttcgcatcccaagagatcaccttagagtgcatctcatatagttcgtatggcttgatctcgcgcttgaatgtgcagtaaacagatccgagtacaatcgacatcggcttgcgccttggcgctggctttccctccttcttgcttgcggctaggaactcctggtcgagctccttgctcacattgccgactccaggactgtaaagtcgggtcaccagcgttgtacgcgaaatgtccagatccgtgaagtaggtgctgttggatttgtgcaggttgtaatcggtctctagcaacggcgtgcgagatgtgaccatgcatggtacgaagatgggatgtgttggtttgcctcgggagtccacaatgagtctccccttggggaaaagtggcgcactgggtttcaaacgtaggttgcttacgaagtgatacagcaaacggaactgttgactcggtcagtagtgcaacataccatggggggaggtcaattccagaaagtcaaatttgacagtcgaacaagggcaaggaacacttacgtgccaagataatgggagacttttcaagttagtcactgcaagaagcaaggccaggttcctccatgaggcgagcgccaatacgcctgctagtatctcgcgtgtatactccatgatgaccccgggaaatttcaaccaacacagaagagaacgtctgatagcttcatacaggtacactagacaaggcttgactaggatatactccggttcatagatgtctcgggagatgagagactttggatcaggcagacttcaccaaacgcaattaaagagagacagaataatgtataaaaaggaatgaaatggtggacccaagttcacctgaattgatgagtccgaaagccgagcctgccgatatcgtgaattccccttcggaagccgaggccgaaacttgtgcacgtgatatcgtgattactcattctctcagtgcgcacgctctttcccagacaacccaggtgcccagaatctgccaaatgtcaataggttttcgaagccgtttatgggtgaaaacggcaggaacaagccaattaccctccaccgacaatagtcccgcagaaggagctcaccatgcaagcatcgggggaaatagtcaaagcttacaagcattggatctgagaattatgctaacaccatgacttgaccagacgttccctaccattccatcttcgcacagttctttacgaaccgaaagtcccatcctgtcgtttactctacgacgttgtcccgccgcgtcgccgcacgcgaagcctagctgcgagagcttcatggccggggtttgggttcgtcaggaatcgtgctaggatgaaacaatgttagacaacgtttggtcgagtcatagtattagcataactctcagatcctggttgcatggtgggctgatctatggattccaataatgctacccaggacctggtttggcctaggaatagttattgttgataagaagtagttgatgtttgaataattgtatagttctaatgcacagaatagggcctgaacgtatcgcagctgctcattggtcgaacaatcatgcattcatcaaataatatcaaggcgttcaccacactacattcaaagatctatgattcgaccttttgaagtttgttgaatttatactttcccgcttggaataagcttcattaagggaaacactcggacttgaaaaagaagggaagatactgatatgttacagcactatctgtatgatttgggtcgaatgttgttccaactatgggacaaggttatgccattttcacgcatagtaaatcaacacacaaaggaccagcgaccacataagaaggaccggtacctgaccataagccgtggaaggttgatttataggcacccttgacaatagaaatagcactcgagcatcgaatagtactctggctcattgtgatcccatactaacaatggggagggagtagcgaaaaggcaatatgttgctacactcaactttgttttgactggtttgcgctcaagttgagatacaacgcatgttttcaagtcacaacattggtctttataccttttcattaactcttctcaaatttctccattgccttccaggtaaccttaacctcaacctcaacctttctgttattgatcgttagcaaatctgaccaacacctcgtgtgtaggcacttttaatttcaaacttccttcctaggtccaaaataacataaactcttcgtttcctcctttctcctgctcgtctctggcaacgcctgtcaacaccaaaaagccttgagactgttcatcatgtcggacgatatcaccctcgcaggttatcttttcgaacgccttcatcaagttggcctacacgccgtgcatggcgtccccggaaaccataatatcggaatactgagagaagccactgatgcggcgcttggatgtgtcacacaccgtagcgatcttagtgtcggacttgtcgcagatggatatgcacgagtcatgggtatcgccgctgtgatatcttcattcgagaatatgtcaccgtcggtctcgacggcaatcgctgcctcgtaccgggatagaattccagttgtgcttgtgattggtacacccgaacgaaaggtgcaagcgcaggcttccaaattccaccattcattcttcgacgcgcagcctaatgttcctcgtcagcctgatgtctttcaaacactcgctgactgcttcgacaaaattaccattacccaggagtttcttgttcaccctagcgaggcgactgctcagattgatactgccattcgaggatgtatcatgcagtctctgcctgtttatatcgaactgccggaagatttggtcggcagtatggtaccggtgaagggactcgttcagcgcctggacttcaacgctccgccccacgatgctgagatcgaacaaacggtagtggccagtatcatgaacaagattaggcacgcacaacgaccggtgattctcgtggatgcgggtgttccatcttgtggtcttaccaaggaagcaagccagctggcgaaaaagactaggtttccaactgctgcgacccagttcagcagaggtgttgtagatgaaacactcaaaaacttccatggggatatctcggatttcgacatgtacggttcatacttcagatcgtctgacctgattctccttattggacctctgaataccactaagtgggctgctcccgccgtgttcgaggcgaagacagcagaaaccgtcacattcaatagaaattccgttgtcattggggaccaaagttatgagctcttctctagacctgtgcttcagcggattctagactgcctgactgagaggaaactgcgtgatcttgcgccctaccccaatttacccaatgtccgcgacagcattgaaatgctcccaagtcagagaaatactgcattacttcagcatgacatttattccaccttttggcgacggatgtctctttttttccgtccgggtgatattatcttgactgaaacccaaacagctcaggatggagcacgctcatttgttttgccgcgtgatacaaccataatcaatcctggtatcaggaagttcgccggacacatgcttgctaccaccttgggtgtcgcttcggcaaaacaaggccttgccaaagcaacctgccggctttcgcacggacgaacagttctctttgaaggagccaagggtttccaagagggccgaaatgacctcagagccatcatcgataacaagctcaatgccatcatattcgtgatcaacgaaggagaacccatcgttgaaaggctaatgcacgcaatggagtaccgccagcaggattctggtcactggagatacgcagaatccgtttctttctttggagccccaaatgtgacatcttacccggtctcttccaccatagccagaacatggggcgacattgacatcattttccatgatgagatggttcaatccgggacagggctgcacgttgtggatgtcatggtcagacccggagatccaaatcaaagcccgtgtattctcacggagatatatggcccacccccgagcccgtttaccttgaagaagcatcacatcaagcaagattgatcgccgcgaagtgagattggaaagacatttgggctctgaaacatgcaagattagacaagtcacaagatactttacaatatgatgttcatttatcataattgcgcccgcaaaacatagagaatgttaaaacaaaatagacagacacgtacgtatacagaaataggtgatatcatcctgaatccgctctatatgataaaatccaaccaccatctagttatgctgacaactctcgcaccatagcccatatagtaaactcctccaacgaatcccagaaccccttaggacgcctctggctaccaacaacagtgaacccctgttttagccagtagccaccagtgtcctctttattaacccgagtcataattcgtagcggagacgacacatcctttccattgacccgatgccgacgcaagatctcttcttcacacgccctcacaagatgaccagcaatacccctgccgcggtattgtggacctggggggagagcaacaacagcaagctcatagtcgccgggacaagcctgtcggtgcaacatttgatcgacacatcgagtattggcagcgtcttcatgcccgtttttagttgtaggcatccaaaggccgtcgtctttccatttctttatacttgcggtcccgaccaatttgggtgtttgatcttcggcatcttcaataaatgccaccgcggtgaatccgtctgcaccaagctcttcggacagtgcggagtcggtgtgaagtctggtcttatttgtggaaaactttattttggcagtgtggctgacacggtagctggcgttcaccatggacgtaaaatctgagatccagggttgattgggaagagctgatgatgcatagaccttgatgtggaagtccattttgggatccatgtttggacctggaaagtttggtgagatccaggatgaactaaatataagaagatatcttgtttatcccaggaaatttctacaatttccaatgtggggttgaacaccgacacggagctaataatgagtcacagaaacctacctcgggaggttatctaaattctagccgacatgataacaaatgtctttgaaatgcaagtcccgaaaataaagatgatttcttaagctgtttggtctgtagatacggactagtgctattgaattcgctgttgtggaagtagacaaggggcatcggtgggataggaatggcccaaccacaatcatgggggcccgcaagtcagagaaacttagagcacatactgttgagagtgagtatatagtttcaaaatgaaagttgtagtaagagctcaccggaatgaagaggcttggaacctgcctctcatactcatcccatgtcttcccatacttgtttttacatttggtgatatccctcatggctcggtggccgatcatgaccgcgaagaagacagggtagaaccagggaagggggctgtcgaacccggtgattagggcccacgacaaagcgaaaaacatatcgcaactgtaatggatcttgcgagccaatcggtaccacccatcaacgaaaatggtatcgccgtcgtctgtcacaagtgtctttggattgttaacgtggcgccaaggaagctgggggaaggtattgcgcgtaaccattttgcctcgctccatcatgcggaaggcgttcttctggctgtttgcagtgtcccagacccagtagacgcaaagatatgacacaaacaataccgccaatgcatgtttgttccatgcatatgttgacgggtgacgattagccaggtacagaacgcagtggcaatatgacatagggacgccagccatgttccagaagatcaacaagaatcccagtttctcctggtacatgtcccatgttgtggtgatgaggtgctctgccttggcgcaggcattggcgtaaaggaagtgtgccatgacaaggaacataacttcaccggagacatagccgtagagttcatattggcgagtggcagctgcgcagctcagacccaagagcatgaaccatgggatacggacttcgtagaacatcttaaagtccaggatcccgaacatgcgtgggttgagttctgctcccatgaaaaaatcatagattgggtaaccagtgatgcggtgctgggtacctcgagcaaatgcagagaaataagcgaaaaagctggcgagaaacccggacagaatcgccacagacatcagaggaccgaactcatctaggatagagtagattgggaacattccagtgtagtgcagagcagccatgacaaccattgtgaagtacaagctactgtaagcggagcaataatactccagctgcttgcctttcaaatggcgaagaggcttcccatagcacgtgaatccaggcatgaagatgtagcatgctgcctcgaagatgtagaatgtccagtagatgcgccacgccctaaagtgcggaaacgcaccgatgtaaacaaggtgacacagatgctttccgaagtccgcccaggactgtccgttttgcggcagaggtagtttcccgtcatagtaggtagcaccgatccacatgtaccacatcagcaatgggaagccaatcataagtgccaagttaccgagtgagccaccgaattcgaattcatctgagtagtccactttggtgtccatgccgggtatccatccaccagcgagttgcgcttgcttgaagtcagcgcgcgaatttggcttgtcaacaacccgagggttgccatcctttgaagacttgacttggtcatccatcttgagaacttgagactattgtattaattgaattgatggaaaccaaggaattgacgccaacaaagtacactcacagtcaaaaaatggtccgcgctgatacaggagaaaggagaaggagaaaggggaggaggaaaaagaaaggaaagggacgagaaaggatgaaagaaacaggaaggaccaaagggaccgagtattgttagttaaccttgggaacctcgaacctgagaagtcaggccaacgcaatgatacagttcccgtttgggtttagaccccgccgtctttatcccaattaggattagaccccgctactagcgttacttggaaatagtgctttggttgtattattgcatttccaaggctcctacttgtttcatagctcagataattgggcagtacgaaacactctacacttgacctggggatacataatagcgccatcactagcgcttgataatttctagcttggttgtcatgagagctgctcgctagctttttttttgattagcctcaatactgatagagtaaacctcctaagcctccgacaacctgttcgttctcgatgctgttagactttttccgtatatctattagttcaatagaatgcaatggcaatgacggatacctagccaatacatacatgtaggtatgatgtgacgtcaggtgatcttatcgcggattcgcattaatcagcgactcttatcaacccgccagtcccccgagattggacttctctccgaagattcacctcgctatgactgatcggtcggtcccatgaattatcagaccatcagtatggacggcaatgtccccgaacagcgtcagcgcactgtgggagggccgtccctggatcagccgcccacagatcctatcgctgatcccgcgcaagcccgcgccacttcccctcagagcttcactccacgctcacttctcgtcggtcttattattggtgctctcatcacattctcgaatacctatttcggcttgcagacaggatggatcagcacaatggcaatgccctcggccttgattggcttttcggtcttcaaggttctatccaagcacctgtctttccccttcacaccggttgagaatgtcttgatacaaacggttgccggtgcagtgggaactatgccccttggatgcggatttgttggcgttatccctgccctggagtttctgttgaagcctggcgaagatggacccgaaggcgatggcggagaaggcgaaggaggtcctttgaaactcggtttctggaagttggttatctggagtctgggagtctgtctcttcggggtggtgtttgcggtcccactacgaaaagcggtcatcgtccgagagaagctgcgatttccgagtggtactgcctcggcgttgatgctcaaggtcttgcatagttctggcagcgaggaaaaggttatagcaccagaaagttcccgtgcgggtatttttaacacggaggccgaaacagctggtccatcccaagaagacacaggcctcttgaaggatggcgatgctgaagaccaagcttccaaggagcaaaattggcgctcgaagatgcgcatcttacttggatcgtttacagtatcgggtgcatatgtgaatatctccaactggactctgcaaagttcatgctaactcaattagactcttttctcctacttcgtccctctagtccgtgccatccctctgtttggcgtgggcatggcggataactggctgtggaccctcaacccgtcgccagcatatatcggccagggcatcattatgggtccatcaacgtgcatgcacatgcttttcggggcagtcttggggtggggcgttctatcaccgttggctaagagccgcggctgggctcccggcccggttaataactgggaagatggcagcaaagcatggattgtctggatatcgctagccattatgcttgccgattcacttgtcagtcttgggtggctggtgctcaggcccatcctgaagtactctccaagatggatagcctattttcgatccactcgtgctggtcagtggattgcactccgactacattcttcccagcactcatatatcaactactccgctttggagccagagcctcatcttttggctcatgaagatgtcgcccaacatacactagtaactgcaaacgaagaggataaggatgatgcaccgccatctgaactcatctcaactcgaacagtagtgattctccttcctttgactctcctcctgaatgtcgcatgcatgcactttgtctttggtgacatcatttccccctttctgtcgacattggcaactctgctggcagtactactgtctatcatgggtgtccgggctctcggcgagaccgacctcaacccagtttcgggtatcagcaagctgacacaacttctcttttcactcgccacgccagcatcccatttctccagacgcaccgcattagtgacgaacctgcttgcgggtgcagtctccgagtcaggagctctgcaagccggtgatatgatgcaagatttaaagaccggtcatctactcggcgcaagccccaaggcccagttctatggccagataatcggcagtcttgtgggtgcagttctatcaactgccgtatacaaattatacgtgaacgtatatgagatcccgggcgaaatgttccagacacctaccgcgtatgtctggatcttcactgctcgccttgtgaccggtcaagggctgcccaaaatggctggacaagtctctgtcattgctggtatcgtgtgggcattccttaccgccttgaggatcgtagctgcgtcccctgcctttgcacgcaacgggaaaccccctccttggagatcttggatccccggcggtatcgctgttgccgttggtatctttaacgagccttcctttaccctggcgagagccatcggtggtatcattgcatggtggtggtcgcggaggcactctgaatcgctcaaccaacaagtggacagcggaaacgccactactatgggatcgtctctggagactgaattacaggatgcgcagcgatcatcaatatcagccgaacaggcatctgaaaaagcagatgccgcctcctcgactgtcgtcgttcttgcctccggcctcattttgggtgaaggtatcatgagcattgtgaatcttcttcttgcaagtgggcgcgttccacatctctgatcaggagagatacgagaaaatgctcccatcggcatgattttttattatcaaaagcacgtattgtatttagagattatgttttgaacgatattagatgaatgtcaggtcatttttcgcggcctttaatgatttccaatctactgccacttcctggaatcgcctgtctcatattgttgctgacttcaaattggtcccgactacacgtgcagtaaaaatataggaaaggcatgtgctaacaagccatgtcaagaaaacagcaatcttggtctcagggtcttaatacccttttagttgatcgtatcccaatttaataacaagatctctaccaagtcccccagccccagccccagccccagccccccgcaccccggggaaaagcttgatgcttcactttcccctgcaccaattcggattaccaagcagaatccactccatggacctaactagttatctccgagacgtgaggacactaaattttcaaatggcgctctccgcaatcctgtcctggagggatcggcctgctccgacatcggcttcggcatcaatatcgatttgccgaagcaacatctacctagcacggagtactccgtactagagatggatttttctccatgagactagcaaacatcactctacggtattgatcccaatcatgccacgcatatggtcgaagggcagttttgtaatacaagtcgagcccgagaaggatcctgcatctcttgatccagcatacctcgtcaagtgggatcaggacgatgtattgaatcctcaaaattggactccccggtacaaatggtgggtgacatttcaactgggcatgcttgctttggcgggtagtctagggtcaagcatcaccacgccggccgatgacaccatcgcgaggtatactggcgtgagcagcgaggctgccgtgttggatgtgtcgctgtatctgtgagtgggattgcaaaaaaacaccaaatacaatgctaatagtaatgccagccttggcttcgtcttcggacctatcatctgggcccccctttcagaaatctggggccgaagagtcagcatactccccgccgtcttttgtctagcactattctccatcggcactggcgtaagcagagatgcagcctcggtgttcgtcacgcgctttttcgcaggcttcttcggctctgccccgattagcaacgtcaccgctgcactaggtgatatatggagtaaagagacgcgcgggaccgcagtcagcctctatgcagtggccgtgaatggcggcccggcattaggtccagtgatcggtgcagccatactgttgaatccgaatatgggctggcgctggaccgcgtacatccacgcaatctgggtctttgtcattttcaccttgaccttcttctgtctgccagaggtatacccgctagtgctactcaagcgcaaagcacaacagcttcggaaggacaccaatgactcgaggtactatcatccccatgagcatttgaaactcgatgtcaaatccgttgtcacgaagcagctcgctcgcccattgagaatgctggtcactgagccgattgtcacctgcattgccttctatgcttccttcgtctacggcgtcatgtacctaacccttgaggtatttccaatcgcgttccagcaatctcgaggttggaaccgcgttgttggctctttgccgttcctgggattgttgattggcgtcatatcatcggtaggtctcaatatctggaaccaataccgctataaccagatatccaaggaggcgaatgggaaagcagtacctgaagcacgacttccgcctatggcattcggggcggtattctttgtcgtcggactcttctggtttgcttggaccgctgaacctcctcaccactggatcctgccatgtctggcagccgtatttattggcattggattcaactgcattttccaacagtgtttgaattttttgattgatgtgtataagctctacgctgctagctcaacggcagctgtcacttttctgagaagcttgctggctgccgggcttcccttggcggctaaaccgatgatcagggctttggggattggtcctgctgtttctattatcggagctgtggctgcggctctattgccagtaccctttttgtttatgaagtatggcccaaagctgcgagggttatcaaagcttgcgcctgaggattcttaggattgttgataattatagaatagatggctagatggtattccacttttatcccttttctaatactggtaatagctagtcacaccggtcaaatcgcatatagtctcgtggttattgactgcaaatttatatattcctttgtcttcaaggtcatgtccaaaaaccccaaaacacccttaaacatgatgcaaatccccaaacaatacttacaagcaattcaatcatcgccggcagtttctggttgatcatctgagttagcaataatgggttcgatctcgaatcttatctgaactctatagacccaattccaaatgactactcgggcgatacgtctcgtacctctagggagagatgatataagaagtatggcagctgcttttcctaatttcgtgccgagaagttcctcatactcagcagtgccacgttcgaccttcatgcacgactcgtgcatcgcagcttcgaaatcgcgtccaagtctgggatagagtatccgcctgatatacggtccagtctcatcattgacgacgtgggtaaacataatatacctcaaagtggacatggggtggtcatactcataaacagccttggcgaattcattccactggatgttatcgtacctaaaaatggaatcagcaacaagcagccccgggccgactagatgtgtatagctattactcagacttgggaagttgaatctcgctagggtctctgggttcagaacattgttaaaaaacgctgtatgtcggtacctgtttccctcggtagggaggcccgtcgactcgggttcgcctccgtccataaggtcgcccagatctcggtgatagctttctccgagttcaaaaacgtctggcggcggggcgttcatcaagtcgtctagagttgctgttgccggggcaatattgcagtctggttcgttagggtcttctaaccaagcttgtagttgagctcctttttctcggtaccggttgattgtcgttgtagaaggcttttcatacatctcatcgtctgtgttgaagtcttcggaatcactggaggcggcaatatttggagaagtgggtggttctggaaacaatagttccggtccccaaaaccgtccttcagtcgaactctccccactggtgcgctgacgcttcgaggggggagaaccgtgagagctaggagctgggctccattcctgatttacatcctcaacctcttcgacgtgcccccgcttcctaccgctataggattgcatgctgtcgttggaggatctcaggctccatcgttcgattcggccagactggtgcgcggccctcaaggatatgggagcacggggacgcggagaaccgaagtacaaggcatcatcatcatcagatgaagactcactttcacctgcattggataaggtacgtctattctgtgacattcgggctagagggtaggtcaataattcgccgggatcggcatctggcatatcaatatcactgtcagatctggggggagagggattgtcacttattctaccatcactggcatcgttcatatcgatatcactcatgtcaggtgtaatttctgtgcgagaattgccatcattgtcggtggcggcttcctgaggtttagccttgttcttaggctcagctggcttagggtctttacctggctttggggctttggctgtcacatttttagggtaagtcattgtagaaggtgcattatgcccgcctctaggtgccgtttttggtaggggcagtgtttggccatcggaatccgagtcatcactgcagtcgcagcggcggccccagcatttgaggctgtggcagaaacgcttcattgttatggttgagttaagctatacgtcgaacaattggattgatagagaagttgaatttatatgatgttggatctgttgtattgtacttgctggacgatgctagaatggagagcaacagagagatacaggcgaagctatatacttttgccaacgtctctgtttttgctcaacatgggtctgcctgctaacccacgagcgttgaagcattactaaaataggttcacctcaaatagaaccgcttagaacaaaaggagtagcagttcaaacaatggagacaagtgcatagagaggagtttcaaccgccaagacaaagagactcgaacttaagttgacaataaggacgactaatttgggaaagccaaggatagaacaaggaacggacaaagaggagtcgaacaatgtaatgttcgtctaagaaataaagagcgagctactatctaccaaggccgtcaacaatgtaatctgctattctcgaatatccaagcgataaacatagtacattgttaaagacaagcaaagatcaatattaagttgctctccaaaggacgaataagcaatatatgacctatctctagatctatactcatgaatattcttgtttgaccaagtccggagacacggatcaacaggtacgagagtcaggccatatcagaagtttagcctgaataactcggatcgggcagatttattaaaatgatcgaatatcggatgtgtatctatttaggcaagccgtacgtgtagtatgccgggtgccgctgacgtccttaatatattaatctatggcccagccggtatccgagggctgaaattccttggagttcttgagacctacgtatgtaccagataatccctggcactcgagacctttccctttcccttttagtactcacctcttgccgctttttgatcactgagtaaaaatgagcacgtccctgagtaccctaacttgatcacgggctattatatgccagaatctcggatgaatactgttatttttcatccctgatacagctaggtcacgtgattgaccaggctggtttttcgcccgaaaaacacccttttcttttcttttatttgttttgatcactaagttgtctatcagattgtcatgttttaggactattattagttttagagagttagagaatttattgagatttttcctgctatatatacactcgccttaccaccgttttcccgtcaagttccaatattctatttcactatcgatatcaattctattcatatagtgtttctgaaaagggctagctaaggtcctagcacggaatgcgacgatatattaattcaagttctcaattttcgcattttgatcttctgtcagagttttccattctttagcgtccttcaaatgttccaacctatgaatcctctggtccacaagggcattcactcgccagcgatcctgtgttcccttcctcttctggcaatacctcggcactgctagtaccttcttcccaataaactcagtcggatctactgcaaatgaaagccatgtatttgcataaataccattattatcctcaatgtcaatgatgttaatctgtaagacctcggggttgatatcgtcagctgggacaagatggtcaaatgttataccataatagtcaatcagcctacttaaattaagaggagagaactgattagccatagggccatcagagctcgttgcctccactaggagagattgacttactcctccggacgcttctccgacatccagcccaggtattcatcctgcacccccagatcacccgggacttccggataaacatcccgtctgtatatagtctgatacgttaaccgtgctagctctgggcctgctggctgtgggaatgttcggtctccaaactccagacgccaatggatatgtggtaggagtctttgtatggcgattaggggaccttcgatttggattctgagcggctgatcagatggtgggaggtgataccggccggcgggtgtgtgaatacaatgaggaatgtaaagtgggagcgccatagatgagaccacttgattgctggagttgattgaggaggcgcagtgactaaacccgttagtgagtgtaatcttggaaagagagggcactagattaggttcgactagcttttttatatgcctagggaagagaactacgatatctcggggcttatcatatgacttggatccaatatcttcggctattaaaaccttcgaagaagtatggcgctgatgtaccgattaatacgccgctgcctggccgtgccaaccaaccaattaatttatacctgatggacgaagcgcttcgctctgttttcctataggactatttccccctgcaaataattactgatagaaatctaggtatggcgagcgtacgggtaaaagtcataatggtagaattctttaactaacaaaataaaaaacggtccttaatgaaaattagtgcggacaaaattatgaagcaaaaatatacacctatgtacttttccggtcctaatattctctggtaaaaagacttggtaattagcatttgaacgcactacctcagttcttgataattacccctgagtgtgacgtaccctggttgatttcactctgttctgatcccgccccctgtgactggctgtgtatgcgctgactgaatgtgcaccctaggcgctactttatatggtaaaaactctcgcgttgtattgccccagaccaatcgcatgtactggctatttcgagctgggattactcggatatcacatggcgtcatttgagaataatggttgcggcggcatcccatacaggcgaattggttggctggcgttaaggtaacactcacggcaagccgcgtgttatgttagtgcgaagtggttagttgcctgtataccattttaaggcgaccctctggtgctaaggatagaggtattggcctctatcctctgccagccttatccaatcccctgcttccgctattctggaggccgtgtcattggtatcatgcctgctcgaggtgactattattactcagccttatggagatcagttctcactgatgtgcctgggtcttttaactgatcctgacctgaaatcgcggggagaacctctgatagctcctaccccactgatggggtccttatctccgtctctatgtgcccggcgccaagaccgctcagccacgttaagtgatctcctggcctagggaaacagtctcgccccatgcatgcttgtgggccaacgatttgatgttgttggatgaacgcgcgggggaagtgaaacagtctagatgtcattttatggcatcaacctagtttgagaaatggtggattatggaagatatcatcctaattacgcgccgaagacctgatggcctctggtccgtcgataaatatcacctgccatctatcctctggagcccagctttatttctcatttcactttctactactgttccatccctgccacacttgcacccctcttgtcaccttagcacaccaccgtatgtacctccgataacctgccatgcctatatatggtttccattgcatgcgccgtgccgctaaatatgtgtgacatttacactgactactgggaatgtggtcatatctatctcgtgcgcgagcatccttgcccccgcgttggccgttgcgtccgccttatcaccgtgtggggataactaagcctggaaactgtggtgctggaggctgcatgactcccccgtcttctgactagactctccgtcgtggccgttgatcatctcactgcctgactgctctgccgccctctctatcctgtttcccgtctctcgtccgcctcctgtggctgtgggcccgcgcaccttggcccatcccaactgggacggggaactctttaggactggctgtgactggcttgattacacagtctggttcatgtgagctctattgtgattgatctactgtctactgtctgtctcgctgttcctacgttctttcttgtggcttttttcctacttttctgtctcttactttatctgtattttgctggagggatatgtttgacttggggtgctggtttctgtgttgcccggcttattttgtgctgatttggattctgcgaagtgtattatagctattagcatgagctataagaccacactcatttctcagaaatcatcatacagtaggtacaccacgacatgcatgcttaataggcatgaagaagatttctcttattcctggtgatacttcgttattagttgctgcgagctcgtacatttttatttcttagtcagtttaagtattttttttcctacataataaatgtaacgtgatcatttacccccaccattgtcgtcccgaagggtttgcagggtttacactaccttatggcctcagacacggggggttgagtgcatcggtattactcactgattagatagttactgagtatcactgagcacttactggcatcagtcattctgcacgtgactggattgagcatgatcactgatctgagtccatgctgacatctactcagtgagcctgagcctgagcaccctcataaaagcggcggcagatcaaataggaaagccccacccgccagggaaaatccggtacgtatagttacatgttgaagaggggacccctgaggggcaccgacagccctgcctgcgaaacaggtgtgagagcagagtcgtcactgggagtagtagggtgctagagaggagaacaccatggggtgactactgagaagagaggtggaaaggtgtctgcgttgctatctaggcctcgggagtgcttttatgtcacatagccacttagtcatcctgctctggaaacccccactgcaatgtatacattgtagatattaattgtttatttccccaggtgtggtgccggaatatttattcccctctgagcctcgaagattgcctttgcatcatcgtactttcaatgtaacattttccattcactcgggtccatgcggcgttttgggcgtgtttggcgcatgtcataacaaagaccggggtgctcttagttagtctgttctcattggcccagactactcgctttgagggcatcccgtctcatttgctgccgggaggttgcatcggtcttggctggcttggccatgtcttgcgctatccaaccgaatccgttttctacactccataatatatcggcagtggcagtgtgaggagtataatgagtagatgttcggatcaaatcggaatgagaaagaaaccacctgcaaatacaccaaatatggcaatatcagcacgttgctttgggttgcgccataacaagccatgccgctacgcgatgactccctgtacttatttcctcgacaaagcggtaaattccagaaagtactgaatgtatagagttagcgctgaattcgtctgaccagtcacaatccagagaagacgcccccaactcctttccccatgaaacttccctcatccccgcgtcgtccgacgccttccccgtatcttggccagccccagacattggagatccccccggtcacctcggattaccgcttttgtgaatccggaggaattgaaagtggcctatataacccgctgatcggcattcccatcatgtctgtaatttgcgatcttctcaggtgtgggcatcatgttcggcattccgaagttctttggctggagaggccggtctctcaacctggctatcagttcccttggtagtctggacttcttgtatgatacaattcaattattattctgaaactggcaactaacctataaggctatttggttacgatcaaggtgtcacgggtggtctgctagacctgccctcattcatcaaatacttccccgatatcaacccactagatccagccatcgccgataacaagcccctccgatcgcagcgcagtctgaaccaaggcattgcagtcgcatcgtacaatctaggatgtttcttcggcgccgtcttgactatcttcatcggtaatccgctgggtcgacggaggactatcttctgtggctgtatgatcatggcgactggcgccctattgcaatgcaccgcgtattccctaccccatttcattgtcggccggattgtcactggtgttggcaatggcatgaatacaagtaccgtacccacctggcagtccgagtcagccaaggcccacgatcgtggcaagatggtgatgatcgagggtatgctcatcacgggcggtattactcttagctactggatcaactatggtgagttggacccagtatgtatgtgacgatcaagtcgcaattactgatataatcctgaattaggcatgtcgttcatcggagaaaaagaggtcgcttggcgattccctctggctttccagattatcttcgctatcattatcttctgctctatcctcaatctgcccgagtccccaagatggcttgtcatgcaaggccggaccgatgaggctttggagatccttgaatgtctgaatgagaaaacgcgggatgacccctacatcaagaacgagctcatcgccatcgaggaaaccgtcaaagaaatgaacaagggctcttatagaagtctgttcaagatgagcgagtatcgagaattccatcgcgtggcactggcctacgtcaaccagatgttccagcagatttctggaattaatctcatcacctattacgtgagatcccctctctcaaccgagatgctatcctagccctatactaatcaagtccactaggcaccttcactgtacgccgagatcggtcttggaagcggcaacctcccaaagttactagcagcctgtaacggcacagagtatctaatggcagcatttatcccaattttcatcatcgagaaagtcggccgtcgtccactgatgctaatcggcgtatgtcactcccccaaactccgtgcctatccatatcccatcagctaacaagtacttatcaggccgccggcatgtccctttcaatggccattctagccggcactaactaccgcctaaccgtcctcaacgacagccgcgccggcatcggacaagcggtcttcctcttcgtcttcaacaccttcttcgccatcggctggctgggaatgacctggctgtacccagcggaaatcgtgcctctgcgcatccgcgctccaacaaacgcactagccaccagcgcgaactggatcttcaactttatggtcgtgatgatcacgcctgttgcgttcgagaatatcggatacaagacctatgtcatcttcgctgttatgtaagatacgatcctatcctccccattaacccattgagccatgacttggaactgacaatagcagaaacgcattcatgttcccctgtgtgtacttcttcttccctgagacccgctaccggtcccttgaagagatggacgctatcttcaagaagtcttctaatgtcttcgatgtcgttactatctccgttaaggagccttatcgctatgataagcatggcgagctcaaacctgagtacctggaggaggctacccgccatgcgagcactgatgtgcacatcgccggtgcgaagtttgacagcgatgagagcggtcatgaggtcaaggcttgagtggttggaagatgtggttggttgtgatgttggtggatttcatttatacccgttgtgccagtgtgatttgatgctagtatcatttcactgagaatgttttatacatggcttttagatgtaaagagatgttaataacagactttctgcgtcgaattttgattaaaagtcatagatgtggagagagatatatataatatgcagactagcaaagcattaacggaaggacgtctatgaaaacggtaaactcgtcagtaaattctacatagctatgaatataaactatctgtgttggaacaagtttgaaggtccgggtataccagctcatctcagcgtgacacgcattttattcgagatcgatgtcaatgaaggaactcgaggaagatgcttgtaacttcgaatcgaagagaaacaataataaaaaagggtgtgtaagacccgaatgaaaaatgaggcaaaagaaagaaaggtaggtatgagaatacggcatctaagacacggacgaaagaaaaaaaaaagacagatgatatgattcagatgcggaaatatgcatccagcgcaaagcacagattcaaggagggttcgttcatcacggacgcgggctatagggatatcaagatcgaggcgaacagtgtggtcatattaggcatgctcatttccgtccagcggggccactgacacggcagcgagaatgcctatgttctgcataatatgtaggcttcctgcaagggtgaggtcattcagactaagcgtcccgggtagggaggggttttcgcgagattgagccggacggagaagtcggcactgaagtcggaagggctggaagctcgctggtgggagcaggggtaggtgcggctgatgagcttgacggtgaaggtgcagcgggagcaggctcaggagcggctggggaagtcaaaacctgcagtgcggcgggagcgggagcgggagcaggggcagcggccggagcaggggcaggggcaggggcaggggcaggggccggagcagggaccggagcagggattgcagcaggggctggagcaggaacagccacaggactcgaaacttgtggcacggcaggagcggtagcggctaatgggctcgaaacggcaggcgcagcaggaacagcagcagctaatggggtcgaaactgcaagcgcagcaggaacggcagcagctaatggactcgaaactgtaggcgcagcgggcactgccataggtggagcgacattgccggcgctattgctacgttggcgttggttgaccggcatcactgggcgctgcattcctggtccgtatggaccagggctcatcgaacgcgggccgggccgggggccaggagacatggattgtgggacaggtcgtcctcctggtcctggagacatggagcgtgggacaggtcgtcctcctggcccgggagacagagagcggggaactggcgggaagttgacagcagttccgggggcagggtaagggcgagaaggtggaggcccagagaagccagcgccgggggatctcggacgggaatcctgaggatagaatctaggaccgggcggacccgcgggcatcattgggcgaccgtcagggcccatgatgggtggaccgcgagagccggggccaggaggtgggcgggcgcgaggcatcacaggacgagccgagaggcaagaccgtggggcaactccttgctgggcgccattaaggcgcgtacaaagagcccacccatcatcgtactcatgaaccaagcgcacaagcgctcccgcacgaagtccaagctcgtcatccatagaggggttgaaatccagttgcacacggtagacattggtagggggtggtgggccagcagccatggcgcctgcagctccggcggcaccggcactggtagcattggtaggggtggttgcagattgcgtcgaaccagtgggggaatggccgcgtgattcggcggaatggtagagctcggaatcattggatgctcgagatgaagcagcagcacctgctgcaacacccaccgctgcggcaccgaccgcggcagctgcgacggtcgatccggaaggttcagtcgatccgggcggtccagtggttggttgagaaggtccagtagtcgatccagatggttcagtggctgattcagcaaccgaaggcgcgtgctggctggcaggggcgttgaaaggattgaccgggtccctgaacgggtcagaaccactgccagcagatttcggcggggtaggaggcgccgagtcaccagtgagattacgagaggcgacggccgaaccagctgcagcacctgcaacagcagcggtggccgggctcaaatcggaagcagcagtggcggtcgggttcaaggcgccgccgctcagatcaggcgcgaattgagtgacgggacgaacattaagttgcgggggtgtcgaaagagcctgtggcttggaaggaggaggaggtggcaaagaagcagcggtaccctctggcaggccttcatcaccgaaggtcttctcattctcccgctgatatccctcttggcttctcttcttctttcgcataaagaagaaaaccagagcagcgattataccaacgccgaagatgacaccgatagccacaccagccttcgcgccaccagtcataccctcagaagtagtagttccaagagcggttgtcgaggccgatgcggcagagtctttggccgatccggtggaggttgcggtggaggttgccgcaaggagatcgttgacatcctgggaagtttccaaggtggaagaagcagaggtggacgacgccgaagtcacaaaggaggttgtcgtgatttgagcctccgactcactagtcgtggtggctgtctttttagtctcagtagtctcagtggtttctgatttagtgtcctgagtggtgtgggccacggtctctttggtggtggtcggttcctccttggacttggttgtggtcgcctcctcggtggttttggcctcggttgtttcttctttggtcgttgtttgttccttctttgtagtagccgcgctgacaggctcaccgacaccggcgtgcacctgcgtcgtagtagtgggttgggcaccggttacataacctcccacctcccctgtaaaatccggcgccacggtcttataaacaatcacgacatcgcctcgctcctcgatgacacctcgtgcctcaacagttccttgctcctctagttcctccacattgcgtgcatggttgtgatgcgcatggccgtgcatgttgtcggctccagtatcccaggatacgtggaggggtgagggttaaggaaggaggttcgcgtattactcctcacgagagggatacgcccagataccaggttgatttctgagtaaccgcgtctctgggtcgattccagctatgcggaatgtgggtagaaagaatggacgactgagatcgagcacagccgatagtcaagtcgagaataaaagaaaggacgtcgacttccaggtcagacaaattgaaagaacggatggaaacaaagttaaaagaagcaaagagaggaaagagaaaagcccacgccgcaatacgaggaagccctggggaaccacgaggagccgaaatgagatcttgggacccttgtgtgtatacaacaacacgctagcccaaacaggcagcgatgcacagacctttcctggtttgattggctgtcatacggtgcctggcccgaaggagttacctgacccacgggcgagcacccttgcagccccactttcctttaagtggctgtggtgtttccaaggtttggctttacgaactgtagaggacttttaaggagtcttgttctaactagtattttacatatatacggagttctttgtatatccctagagtatagttctgcttgaaatacccctaatctatctatgctgtagatcgtatatctaatttaccaacactataaaatacacgggaagtaacaaatgccgaccccatttgcccgcccccaagcggcacattcgctaaagtgtgaggcccagcacacgggccaggggtcacactactccatggttgtttcaccctagcacaacagccacatttaattgatcgctcacggaggccgtaatttccggtgtttgccggaaattcacttttaatcaattcaaattttaataatgatgcatgacacctttgcgccattctcatgcaggtccctcaggggttacgctgcacccccaaggttggggacacgtattgatattttggtacctgtatgtaagatacagattctgtacaacataggcagtactccttacttgagtaccgagtatttgcatgttatagtctatcaatagtggattgccaaacgtgattaattcgctgttgcaggttccacgcctgtcattcccagatccactcgtgcggtatcacccgaggaggcgcagaaactgtggcgtagctccttcaggtgtatcataccattgcttcaagtctgagcgaaatagggatgggcaagggcctaatttactgtcagatgttattataagacattaagtcaagttacatacctctgttgccgagagtcttgcgctgctctcgtagcacaataggtggctgactaaatcacggccattcgaggatgcaccaggcagaatatcctcccagctctgcgtcgggaacgagtagaattccactttcccccaatctggcagaacctggacttcctgttcaatggttattaacgacgtttccatttgccataggggtgatgcttaccggccagcgctgttcatccggagtacccagttgtttgaagatggagaaaatcagcgatagatcgctgcccacaggcccggagtcgaagagctgacggtgaccaacggcaatagcttctgccactacacagccggcagcccacatatcgagagctatcccataccctttgaatccaaagagaatctctgggggtctatagcaggtcgtgccgacatccgtgattttctcggtgggcggctcagatcccgcatcgccttctttccatgagacgccaaagtcagccaaatacgctggtccgttgggggagtccatcaaaatattggaaggcttgatgtcccgatgaagtatgcccatgtcgtggatatgcgccagggcacggaatagatctcgcagaatcgatcgtgtttgagcagcagttaccatgtctcgccggagcaacttctcgaagtcatatcgcatgaaaggaaggaccatgacaaacctgccgccatcaagattaaatgtctcaatcaatggaattatattggcgtgcgccgcttcacgcaacaaacgtgcttcacggtgagcatcatggggggctgtcatcatgtagggaacagtgactttcactgccctaagggtcccatcttccaactttgatttgtagatggtggagtgaataccatcaaagtggtggaaacaggaccgatattgaccgatcacttcccctgttgaggcctctggttcttcaaagtcattctcgtgctgtgggctgctgtcgacctgtttttcagaccctgccaattcagcttgatcaattgccttttggcagatagaatcatattcatcctaggtggattagtcccagttttcacgcccgtcccaaaaaggtacaccactcacttttgaagtcgccttgtcatacgcctcggtttcagtttgcttggcttgggccatagcttctgcaaatgcggaggcaggcgaagaagaagctttctggtaagccgatgtactacacgcaaatcaatcgagtgtccatgttgatatagatgggaaagtcgcttacagagattgtatggctcgcagccggtctgtgaacccgaaattatccttccaagacatgatgtaagaacactgctaatcaaggtagtaacttctaccctactgccttgcagtttttatggcagtgtatagtcaataattaaagcaacgtaaatatagggaagatctattctatcacctgatgaagagctatcaaatgcaacctgaggcagcaaggcgccaacatcccgaggtcaaccgcgtggatgatgtcaagtgaccaatcaaggagtagttacagttttgtgacgtaagttacagacgctcaggccgttgttgatgatttaatactgccaaatactgtattacaattacaatctccgtcattccatccccattgccgtcttcggccaacatcgaatgacaccctaccaactgacactggcattcggtccccgcattcatttcccttacttgattgggcccttctcgactggaggaaacttttggttttctcttacatgttatgcgcttcgtgcgctaccttgctcagtacctcaataccccggaatctgaatcatggacctctcaaggcaagagtatccaacgctgctggtaagattgagcaagtcgagctacaaaattgacaagcaaagcatctagttactgatcgttgacggtgtctcttttatttaggctagcctgcatcccagccaagctacaaccgtcctgagcgatcgcatccgactcataaacaaggtcaacacggatatcgcggattatctacaggtatgacaatctgtcactgatccaatcagattcctggaagggatctgcaacggggagcgacattggtgttgacatactggcaataggagcgacgtcgagttgaagaagcatacgcccaagggttgcggaagctggcgcatcggccacagttggacaatggagctgctcttgggtaaattgacctttccctggaagattgaaattttttgcatccggtaatgatactgacctgcgaaaactagcattttccaaatcccctggcaacgcatcatcagtgccaccgaaaccctcgccgtatcgcacgagacccttgcgaacaagatcgaggaagatgtcgaacgaccactaagagaatttagcaccaagaatcaggagatgaagtcgttgcccggtatccaaagtagtctggcggggttggcgaagaatgtggagactgcgcagaagaaggtagacaaggccagggcgaggggtgccagaggtgcagacaaactttccagcgagattgccaatgccgaggaagtccaccagcaatgggattcgcgggctccctttgtttacgagcaactccaggcagccgatgagacccggctgaatcaccttcgggatgtgctaacacaattggagactcacgaggtggatcaagtcgagcgtggtcgccaggccgctgaaagctgcttgaacatccttctgaacgtggaaacagcagatgaaattaagacctttgctgcgagaatggcgggcccacgagtccctacgcaggccatccctagaagacagactgaaccggcagagacaactttcccaatcgaaccagtatccgagcggacacagacagcgccaatcgatcgtgaattctccacgccaacaacagaggctccgcttccgtcccttccacgcacccatgatgatgcggaaagccaactatcagaggcatccgagagaaccaccgtcgctccgacacctccaggtaagttctacagtcgggttccctatgaaacattgagattctcatgatttatctagtaccagaagcacagcaacggcatactcctctggggggattgagacgtcttggcactgtcatgaacaggagaaagagcgttgtcttgccttcaactggatctcatgaccgaaaggcagacaagaaacgtagtccctttgctgcattcatgagagccgactcctctcgcgatatgcaaatacctgaatctcctcccgcgaccggtgaccgtccgggaacatcctttaccgatcaatcatccttgcggaatcctagtatgtcgcaagaccgtgccggattagatgctggggcaactatgtctgaacactcggagaccagaaatggagaaaccaataaccatatcaatcaggtaaattaccaaccagcgagttaattaaaggtgccaaccactgactgtgtcttgtttagccacaggttgatgccgaagggttcactcaacgccctgcaacaattgacgagatcactcgtgcccagaatgaggcagcggggtatgttaccttttgccaacggtgatgaacgaatgctgacaatatcactacagcatagatgagtctggtctaaacttgacaattcgagatcagcccatcttcgaggatgagaatcaagcgaagcgagccatggatgatatggcaaataccctccgaatggttagtaacaggtctcgccattgatcaaatattgtgtatgatacttactctgtgtacagcgggctccgcagacaggagcgagacgaaacgcaggcactattcggggacgccgtgacgtgcgcaatacaatgtttattgcttcgcctagcaatgagcctccgccgtcttcggcaggatcggagtcacagccaccaacctcgccaatcaggcatatcacctcccccagcattgcccccagtacggatgatcacgctatgtcagatactacatctgttcgctccggacatggcccgggagcttctatccatcctgatctatatgaatccggcctgaatgcttcaatcattgagaccatcaatgcatggttctcagagggtaatgtcaccaagtcctttgtcgttggtgagcttgctctggcaaacaactccccgcctggtactgtggtagacaatgcgcgcatccgactcgataacttccaagtgctggaaaaggtagcggccaatccccactttgtccaggaggccaaagacacaggcgatgacagcagaggcgaatacgatatccagctaggcaacatctcccgccccatgccgacagtcgcattcaaatatcaactgcatatcgacccaagcaacccctccgcctactgccctgtgatatttaatccagtgtggaacttagaagaaaaacaagccagcgccatcatctactatacgctcaacccatccttcatatcccacacaacggagtcaattacccttaagaacctagtcttgaccatcaatctggacaccgcgaccgaggacaaaactaccaagcagccgcgggagtccgtcgcccacgccatcagcgccgccatgtatcccaataccggcgccaccttccgtcgcaaaacctctaccgtcacatggagaatccccgagctggaagtcaaggctcccaccaccccaggcgcagacagcaagttcctcgtccgcttcatgacgtccacccccggaccccgcaagggtacagtcgaagcaaggttcgagctccgcggcgctgaatctgcttctcagcttggtatcagccgttctgcctcagaaacagaacaaaaggaagccgaccccttcgctgacgatggccgtgattccccgctgtccgcgacttcctggctgagcgtcccgacttcacgcaagctgatcggtggaaagtatgtgtcttcctagatatgtcttgcgcaatgcgggatggaagtacccatgcttggtcgtatatattcccttcttccgtgcaatccttatgtcacttattcgttgtttggatcttgtgtgtcatccctccagacagggccccaaatcagagcatcaaaagcttaggatgccattacttttttcgttttgttttctttctgcctttccctctttgtctcttgtattccgagtattctcttttcaaataccgatcttgttattcgtgaagtttgttgttgtctgttcgatttggatgttgttctgtgtagtcaggcatttgcttcgcgtacatatgactgtttcaaacacatttagatataccagtacgtatgtagtagtcaagagcattaatttaggaaatctttttcgacccgtccaaaaattgtctgccatcgaaactttgaaagctttggagagtgctttgaaggtgtaaaaaaacaatccaagtttataagattgagttattaagccagctttgagttcgttcctaatcagattacaacatacgccctaacctcggtgcgatatgcagcctctgtggcttgcccttttctcatacctgcttctctattctcgaatattctagaacgagatcaagaagagaagaaacatatgtaatccacagaaacgctgtatctagacctttggctatgagactactaagtctaccgcagcaaccacagagctaccggagaagcgctttacgatcacaaccactgctccttgttctcctcgatccaggctttgaagtccttcatcccagggtagagctgacggcatgcagtcacatcacctccatacccttcatgttcaaaccaacgaaacatatcacccacggtaccttttaacaaaaacttgactgtagaagccacagggcaaggagccataggcataggtgatcccacaacagccttgaacgtcacatcagcctccctttgagtaagctcatcgccaaccagtgtcagggcaacattgcggtaatcatcaggtttcatgaagctgtaagccgcgacccgaccaatatcccgggtcgagacgaactgcagcttcttgtcccccatttgctcccacatgcgggcgaagcccttcccatggatatcggtagtgagattctcaaagaacgtcacgggccgtaagattgtgtatgtcatatgttgcggactggccgccgctctttcgatcaagtgattttcgatatggtatttggcagcaaagttcttgactttggtaggattaacaggcgacttctcagggccaccgcggtcacctgacgagtagacaaagtgttgcacgccatgggcgaccgccgcgtcgacgatggccttcccttgctgctcttcagcgtccgagttaacctgcacgctgtatacgccccatacagggccgactttttggaagatggcctcgggctgcgttgtgtcgccgtccacgacggagacgttgaaattcgcgccaagcttcagcgcgcgggggctgacgatgtcccgcgttacggcgacgatgttgagccccgccgtgtcgggggccgagaggaggctttggatgagggcgccgccttgcttgccggtggcgcctaggactaggacggtctttcgcggggcagacattctcagatttgaaatgataaatgatcaagagttatgaactgaagttggagccttcgctgcactccaaggcttattgactagctttggggcctgttattgcgctagaccaataatggaggaacgctagagctagtaggggtatgactgcatttgttgctccgtataagaattagttttaattgtgtatcagaaatatgtctacctagccaatagagatttcccataggcagcaactcaagcacgctgatatctaatagagaaccaaatgagttgggctagtctatatgcaatagctatcggaggaaaagacaaactcaatctgacggacggcgagaatggtatatggattattgtagcgcagtggctcatatgctcggtgaatctatttatgtttacactaggcctgaagtaatgctatatgttattgggatctatataagctttctttctcacattcaattatgttgcgcccacgaattgatagagaggaaggagtggaatatgtaagaattcaagacctgacaaatataaaagcctcaacatagaatcgttcaattgcaatcgttctcaaactcatcgtcaatgccgttcccgatctgctgctcgatgtagcttatatcgctgaattcaatacatccaaaaccatcgtaacggacggtctgattatttgaatcaaagaatcccccacctagactgtccaagtaaatctggaatgctatcctaggtccgcacgtcctaaaagctttggtcaagcgatataaccagcgccctgtcgcgtagggatcgggggtcaatatctccctgcggaaggcatctcgtagtgtcgaaaagctcacttcctcgacaccgtgttccaggggcctcatatcttcgattctccaagcgaggattgctcgaagtgagacaatcctcaatatgtagtcctcaggtatctcccattcaaatagatattcatgtctgaatacgtttgaatccagcccaagctcctctgcgagcctctgagcatgatgtgggccgttttctacatcggcctttggcactttgatacagatgatccatatcttgtcttcattccgggagttgtacttccccagagcacgattcagagcttcaagaggacggtcggtgacagaaactagggctgtaggatggccattccacctatttcgatgagagtcgaattcggagaggaaggcgtgttcagacaatttcggacggccaaagtagttgtcatacgctccggatctcagtccaccagcactggtcaaggagaagcagcgataaaaatattgatgtttcatggtgagatggttgtcaaaggtagagactacgaaaagtaagaagaggcagagagggtttcagccttgaggggattaggctgcaatgcataatagtatatatatcaatgtattgggtacaaccccggttctttggtcagtaagaaaaagtacatcctaagagacgctataattacgagcgaagtagattatcacagaggggtaaactatcctttagactcttataggctgcccagaatactgtactttcatgcttatctacttttcgactttgtgttccccgattgggcaaggggtgtataggcttgccctccccaggatcaaaaaagcgcaaatggaaagatatacatagttatgcggtgtcggattaataattgctgcatagaataactatggataaccgatgacaagacatacaacatagcacacattgacatgtgctggggaatcacaaaaatacagatataaaaaagtagaaaaagccttagcgaacatgatactgatcccacatatcacatcctagcagcgcgggtggtcttatcatagaagtccaacgtcatggccgccaggaaacatggaatatcctttctttcttccacccagaatttgatgagaggtttaagttccatggcaaacagactattcggtccgcccgatatcttcatggtgccgttctcgccatcgaaaacgatagaattttcttccccattgcccatgctgccaggaccagagtcagaaggtgcatcgcagtcgccgtgccgataagcggaggaaaggtgaaacatggaagtgactcgcactctaccattcggcaagaaatcaagcttgaagccgagaagagaggcgacggcttcccggaactcagaggacttagctgtccagatctccttcaatcggcgcatacgcttttctttgtcggcaacgatgcgctccatgtcttgcatttcgagcttgatgctctccacggtgctgaccgggacaaatttgacatcggtacggcccccgcgcagctgtgccattagatctctgtttgcagactggagggttgcaagagtagtcatcttgatttgctcggtttgggccgtcggattatcgcgcagttcaagaatgcgtgttcgtgacttggccttcaaagacttaatctgtgatttggccgcatccagttcccggcgagcgagagtcgtggcctggtctgatttggtgagatgttcctggagcttgcggttcttgcggctgagcacagcgatacgctcgctttcggcttcgctgttagtcggagaaagagctcgtttgacgcctctcgcctcttctttcggtgtagcttcctgcttggagagctcttcatgaactttgtgaagctcactgcgatattcatcgacgagttgttgcagctgggttatttgttcggatttttgttcatcaaactgcgactgatcttcgttcattgtagcctcttccgcatcaaatgtcttaagttgtgcgcgcaggtattcaacttctttcactgcaagcgcacgctgacgctccagtcgagctcgaagccggctctccgcggcgaccggtcctcctgcagaagcggcacccgcaacgcggagtttctccaactcccgttgcagattatttttatcattttcgaggctcttgatagcctcgtccttctcaaggaattgggcatcaacagttccgagacggtcaaggagcgtagcgatctcaattcgtccttgaactaccgccctcacgatggcatctggtgagtcaaattctgcaggctgctcgttttcctgcaaaagactgacccaagattgtcgctcatcttctaagatctgcttctggatctgaactgtattgagttcggcttcaatgcccttcatcaattggagctggttctccactgatctcttttgttcttcgacgacttcaacattcttcgaaacttttcgaaggtgacgtagctccgttgtttgatcacggtttgctgactccaattcccgaatatgatggacttgctcggaaagttctctctttaatacagccaaaacctcggcatcgttcccttcggccttcaatcgaatattttccgcttcgagctcggcgacctcggcttcacgctgagacaatttctcctgcgttgattcctgcgatgtcctggcattttgaatatcggtctggaattcctcgatggtcttttgtagagaagcgcggactgtctctaattcgttgatctggtatttgaattgccgttcctggtcggaaagtcgagcctgagtgtcgtcaaactcttcctgcaagttctgattatcatcctgaaggcctctaattttgcgctcaaacgcaagtttgtcattcaaggcctggtcctgaatttctttcaattcctttgcgagttcgtcgctcttatgggtggcccgattactcgaagattcggcagtctgcagcaaatattgtcagtttgacctcgtgaaaatgaaaattttgtagcagctcacctgagcctttcgaaaatccgcatccgctttcagttgcaggtcgcgaatctctttttcatggcgaagagcctccaactctcgttcctgtttgatattctcgagctcgtatttgagtgtgctcaattgcacgcgtagctcatctttttccgcatctagacgggccagtcaggtatccgtcgaaggcatctcgactttatctgagcagggtatcgtctcaccatgaataagttgatgggactgggcttgagattgtgtgaaacggccggattgtcgcatagtagtcgatcggcgcatggtgctccgtgaaccggagggtgttgggggtgagccgaatccagcaacaagctgggaagctggtcggttattctggctatggtccatctatgaaaagccaggagaggtcagttgttgcgcaaaaataatatggagacccattagagctcacggtaaggttcaggctatcgtaagccccacggaaattccgttctaatgcggcatgaggcgagaaggactgcacaacttgtcctggagccgtatcaaagggaagatggttaaaggcggcaccgccttgtttaggattatgtcagcggtgaacttcacctcaaaagggattagcgcctttttaaaaattatttcgatttcggcatcaaattctcagttcaccaccttcacccgtgactcctctcctttcacctcggtctctcgttcgattttactcaatttcttccgcttaataccccacaaccgctacaatgggcaaggacaaggtcgagaagaaggaccgtgctgagaagaaggagaagcgcgcggacaaggacggtgtgcacaaggtcaagaaggagaagaaagagaagaaggataagactactcttgtcgatgcagtagagaaggagattgtctccgagcccatggagggtctcgagcagaccgctgttgtcaagagtgaggtcgacgccgttgtccccattggcgccctcgtgccgttcgcccacccattggttgaggacaagcaggccaagaaggttttgaagagtgtcaagaagggtacgtggattgtctttttaagtttttacttgcctcttttactatctgtgcgcatggtcgattttcatcggatttggatcgcccatattcactgatcgcatgattgcgcgacttttttttcttatctccagattctccatgctaaccttagttcttctagctgccgtcaacaagtctctcaagcgtggtgtcaaggaagtcgtcaaggctctccgcaagtctcccatccccgctgccaatgctgccatcggtgtccctagcggtgtcgtcgttctcgctgccgatatctcccccatggatgttatctcccacattcccgttctgtgcgaggaccacggaattccctacgtctttgtcacctcccgtgctgagcttggtgcttccgctgccaccaagcgccctaccagtgtggtcatggttacccccaaggctgccaagggcaagaaggaggatgatgaggagttcaccaaggtcttcgaggagcttgctggcttggcccagaaggagatcaagaagctgacagtctaaaaatgttctcgacttgtctgctttaccttttgttatttgctcttcccacgctgttcactgcgagtgggttctctggttgtacaggtttctgataccgtctgttcagacggtgcatgtcttatggggtccggcctatgggtatctttctatatttgctgttttgttccatctcggcgttatttcaatggtgtacgaaaaagggcaagaattccaatgagataccaccaacctgatagactttcggtcatgagtaaggtcttgggtaattccaatggacatccatgcaatttccagccattgtatttccccgcaggcagtgtgacacctgcatagaccacgttatgcctgattgttgtaggagttgatctagaacagccggctccccttgcgtgatagataaacaggtcgcacatgaaatgagtctcgaccccttccaattttcgatagtgtcttaaggcagtcagccctacctaggtacatttgcgcgaatgtaatcagtcacacagcgtagcgaagtcaataattgtactagcaaatcgggtcaacacagcgctaaatatttagtgtgaagagccaagcctagacaattagccttgcatcgtaaaatgaactattaacgtggcgttctatgtctacgccgatcaatatgatcaatccctacgcccctcgaccttgacattgaacaagggatgaagtacctaccccaagcgcagcagatatcagtatcagcccaatcaccatgcgtagcgccctggatgactctgatcctctttcaacactagcctaggtctagggacgtatttggtatcaggcaccggatctgagaatcgggtggtgacttttgtcctacgcttcttccttgtgatcaaggctttatctccccctgtccttaaaaaaatgatttaaggaactatacaccctcattatgcgtcgggcaaatcattctttctgcatgtacggctgtatcatttagccaatttcctttttatatccctggaaatgcatatcaatcgcccctccttcctaacactcgccctcattttggctgttactcaatcaactgcatcccaccccatccgaactagcaaatgcgtcaagatggaacaattccaagaccccaatgctcgtggaatatggaaggtctttgagaaacatgaagaaggatatgatctattaccccacccaccgcacgtcaaatacaacggggtaagtaccaatcctactatgtatattgtccactcggcgacttacctatagccactatagaacccagcatggccaaccaacgaaaaaaacgaatcaacagagcaggacacaccaaatgatcgatatacaacaggaacctccgaatcgggaaagccagtctcaatcctgattctggaatccccagaaatacccgatcaaatgatcctacaatacttgcgcacaaaaaacgctctaaacaaggagcacgaacacacctcgcctccatctttctcccactcctcttcgggtccatcccgcttcaccttcacaactttaagattgaacttcccacagtatcctcttccgggggtttctacgacagtgattactctcctggtactggtttggattgttatgttcaccattgggctgcttgaattggcgaattatctttggagacgaagggaacaagctttggtgagagagtgtgttcaaggtctgtatgatgaggaggaagatgtgggcttcaatgagacaacaaagatgcccttgaggatagttattactcctccgcgaagcaatggactgtgctccgtgggagaatacgaatatgagttccttgagtctgtttctagtgactatgagtctgactgtgagtcggactcgggttcggactcgggttcggaatctgatgagtttgattatcgtatcttttgatagatagatacaggaatgacatgactagttggctcgatggtatgtcttttctttccaagtagaaaaaggcttaaattgtgaaaactgctcttttgtctaacctttgatacatctcatcgttattttcgttgatcaattattgctagtcttataatagaatgcatcgaacttgacaattacatggcagaatttatggaattgaaacagagtaagaataattatattttcaggtgttactgtacatgagtatacgcagtcataaatcatagctcatcatagtcccagcctaggccgagcccagtcaaagcgagctctcttgcatgatcccaatacaaatatgaaactcgttgggccaaatctcaaacaatagactcaaatacgctggtcactctgtaggtgctcatatacagtatggccatcagcacccttctgatgagggcgggcggagtcataagcactgtgcgcattactgcgctcaaatcggttgatagcctcacggccagggtcctggctggagccgatctcagaatcgaagctgacattcttagaattgtcggagggcaagccaccacggttaatttcggtcgcgccgacgttgggctgactcctaccaccactgccgccggtggtagaatattcgccagctttgatgcccatttccttcttggttgcagttggaccaccggcatacccgttttctgacattgtgccagggaagttgccttggccgacaacgcattcggggtacttctgttcctcatgacggtcctggcgttgagcggcggtttgggcggagggaagcttgatggaggcggagacgtcggtgttgtttactgtggattggtctcctgagacgcccatgggctcggcaccacggttggcagagaagctgccaccgtggcggacagactcggcggcaagcgaatcattggttacaggaccagatggttcttcgacgggctgttgtgaacgaggatcgtgggtgaccttggtgccacggttggtgggaggaagaggagtgccttgaagatccatgatgatttgattgattgaaaagggagaaggttagattgaagttggtgaagatatgttcagtagagaagagatgggagataattaattgataaactctacatggccgtgatggcagatctatataggaaaccagtgagctatgacccgtccgcatgttggaagtatatggttctcatcgaactacatcgtatattaaagataattgatgtcatacttacgttaactaggagcatttgcaagatataggcaagctcgatttcttggctagcagcagtccatgtcgactaattatatttgagatactctgtttggtggctggagaaaccgatcgaactcgcatgtggagaacatgctcctctctgatgtattcatgcctccaaaggggaaactatgcccccacctcttatccctgtatctcctgagaagcttgacgttgagaggcgattgacgtcaggtctagaccctggtatgcaaacagtgcaaatatctttatctttactgctgtgcaatgtacagtcttggcatttaattttatattttgttcgatgacggcatcgctgtttttcatagcaacagacttttatatgtttattgtacacaggtatagttttggcttaacattgacactacatgaaaccataggctttctagatctgcactattatagcctccgagtagaaaaaaaaaagaaagacggttggttttttctttcaatagtctatttgatatagtacaaatcatcagcttgaaaaatttgcgattaaacttcgtcgctcataacttgagagaaaaattgactacacataataaaccctcgtgatcacatattaacgggtcatacctagcatcagtcaaggtgtgatgtagtcctcgtcctcgagcccaagttcgttagcactactgccggcaggagcacttccacgcaggccactgttatcaggagggaactctaaacgtccagagccaacgccggtaatacgttggtcgagggaattccagtcactggcaactgggggttgatcaggcagaggcagattggccttaaccctgtcaatttgtgcggacttgtcggtgttttggtcgataatagactatagagcatatgttaggctatctgatttctgcttggcgttgggtgcagatagctcaccttcattctagagacatttgagtccgctggagggttgccaccgtgcaactgggaaagcttggactcggccctgcgaaggtcctggatggtggtatggaaggtagcgttagacattttgcgtccggctgtaaatttgatgatttaaacgaagaagtgtcagaagtggctgggtatgattttgaatctgaagcctcaaggcaaataaggacttatatatctactattttctctgtcgatggcaagacgctgtgacgtctgctacaatgacgccatggcatccaatgccatgggtattctcaccacagaaccatctttgacatgcttcatgttggttgggaattctaggctgttgggccaacagcagagtaattaactgggtgagtcttggggactggcatcatagatgatggaccacctgaggtggcgagcctgctgatgtgcttcaacgacaagatgctaccaagatgctacgcatatgatcccactcgaggcctgtcgaggagccaacggatatcttgaagctagacggccgagatgttctggacagattgtatgcaatacccttcagtccattgattgtcgatgttctcacacgtttcttggtatattacgaccgcgatcgggagccttcgatgaataatcgtggagggcatcatcttaaactcgatcagagcctagtacatcacctatctcatgtttgacaacacagcaggagcccatcctaatcaagcttgcacagacctggaattcaaggacgggtatagatatacagcggctagccataaatttccatcatgaattatagccaacagaccagatatcggtttctatcctcgagttattccataatgatttcaaggcgcgatagtagacgcggtatccactgaaggcttgaagagtagcggcgtcctaaagcggcataaaagcatgcaggtcatggctagcaccgccttcctttttagagcggcagaaaatgtttcttatcgaaagacagccaaccccgagatgcgtggagacttggtgaatcaggtcattgtgttattccaaggatcgtttgcccttcgacgcatctatacttcaatatgggtcgagatccgctgatcggactggtgggaaaggtatgttgttcccctccattgttctcacaccccactgacgaggggcatagccgtctagtggaaaatctacaacattgaacagcttgaccgatgcgacttcgaaagtcggtaagtgaaccgagatgcgattatgaccaactgaaacctaataaattatgttcggaacaggaaacttcccgtatgtgctccccgattgttctacatgagcatctccaccttatcgcattgatcgcgcagaccgtgttgacaaccaacagcttcacaaccattgacccccagcgagccatcggataccttcaaatcgactgcccatgccagcgatacaatgtttcagatcgctgccagcccaattacggagcctgccacgaagggcgacgttccgtgccgattgagttgctggatgttgcaggtcttgtcccaggcgcgcatcaaggacgcggactaggtaacaagttcttggacgatctgcgtcatgccgatgctctaattcacgtcgtggatgtgagcgggaccacggatgctgaaggttagttgggtgtgccggattgaatacaatggcgggatcgggtgttgataaatatcgcaggaaaggctactcgaggttacgatccctcagtagacattgagtggttgcgatcagagatagttcgatgggttctaggaaacttgatggagaggtggtacgtttgcaagtgccaacaagggaacgagggacaagtgctgatctctccttaggggttcaataaagaggagacatcaggcattgagtcagtggacttttccaatgctatttgttacaccgaactgactcttagcacagaggcaaaccctgtcgacacattacagaaacagtttgctggttatggaagtacccacgccactgttgcgcgatttatggataaactcgccttaaaagaaccattggaagactggtcaaatgagacggtggagcttgttgtgaacgcttttatcgacgagaaattccccactgtgttcgcgttgaacaagatcgaccacccagatgcagacaaggtacgaatatttagcttatggcccatatattgttctgacaggaattgcagaacatcagcaaaattgcgaaaatgcaatctcccgaaagcattgtgctttgctccgctatatccgaggtgttcctccgaaagctggcaaagcaggattacatcaagtacgttgaaggcagtgagttcatcgacacgcgagaagatttgatcgagatgggcgacccagacggaggaggcctcaaagagatggacgagaaattgaaaacgtatgttcagtgctcatataaatgtcgtacttttgctgactgacgtcgctctagtcgggttgagaacatgaaagatatggtgctgtatcgatttggatctaccggggtcgtccaatgtctttcccgagccgcagagcttctaggactcgtaccagtgttccccgttcgaaacgtggcgacattcaattctggcactggaactgctgtattccgcgactgtgttttggtcaataagtgagtactctctattagaaggctgacgccagtctaacatttcacagaaacagtaccgtcggtgatgttgcccggaaggtgatgggcgacgtacctatcaactatgtcgagggtgtgggtggaactcgagtctccgaggatgacattgtggcagttgggaaacacgacgtgagtgcccccactaactacataatacggttgattgactgattaccatggcagatattatcgttcaaggttggtcggtagaccagttcctttatgtacagcatctcccataatatgacattagtaatggaaatgtcttatggactcgttctctgctagaatcacaaatttggggcgtcgacttcaccgtcgagctcgaagaacgcatagcccatcacaagatactttacttcaacccccctgattaattcacagtcagcaacataaatcccctatcattcatatggactgaccttttgccgctcatcgttcatgccaatgattggctctggcgcattgggatgctcctccttagccttcttcccatgcttggtcccgcccctctcggtcattccctgtgacttgctgtcatctgcaattccctggtatgctctcctctcctccaatccagaggccactgcctctgaatgtacatcgtctgtatcacctttctgagacctcttgcgtatgtggtcctccgccgaactccctttccaatcctcgaagatggagtagtatcggaccccaagtggtgcacggagaaccggcgggcgtatgacggactgtaacggtaggatgacccgccaaggttggcgtgaaacagacatgttgtgcagcattgatgtagcagaaaagatacagtggttgcgcatagtgaattgcgagtaaatctaaatactggactcgccacaacgttggcttttatgattattcctactgcgtgctatgacgtccctatgctgcaatgcttttctgtccaaaaagggtaagggagccggttcgagcgggcttatcgataaggaatcgatcgtcatcgacgcgacattttaactaagcggacgacaccaaccgccaactcactatgaaacgcgagtatatcccgatcgaatccctgccagcctggcagcggctcagtggggtcgtcgtccaaggcatagaagtccacaagattggatctgatgaacatggcgcagacaaaggcagtgcgctcatcgcaacagaagcccagacaagcagcgagaacgacgcaaaccccaagatcctgctacaaatccccccggaattagttctctccctggaaacagtccataaccatgccaaaaccgacaggtatttgcgtgatgtgttggaggcaatcggcgactttggaagggtatgacccgggctgctcccttgtatctaaagggcaaaaccaactaagatacacagacagccagaggagcaatcctcatatttttgctcattcaactgtcccataccagcccagatctgcgctcaggacacgagaccatcggtgtctccaatccctggactgaatacgtgaagttcttgcctccgtcgttcccgctgcctaccttctacaccagcgaggaaaaggagctcctccgcggcacgtcgctggccgaagctctcgatgcaaagcttacttctctcgagcgggagtttgaacagctccgcgaggctacggagggtattgcgtggtgccagcggagctggtgggatgaggagaccggcgcgctgaacattgatgattggaaatatgtcgatgctgcttatcggtcgcgcatgctggagctacccggcagtggcctggcgatggtgccttgtgttgatatggccaatcatgtctccgatgatggggtcaaggcgctatacgatgtagactcggaggggaatgccgttctccagttgcgatggggcaagagccttcagcctggagaagaggttacgatttcgtgagactattctacgatggacgaggttgtggacttggctgatatagcatgacaggtacggggatgaaaagcccgcgtctgagatgatattttcctacgggtttttggaaagcggcacgacggaagcacgggggattgttctcagtttggatatcccagcggatgaccctctgagcctcgcaaagaagatgttctgccgggagaatccgggcctacgaatatcggccgttgagggctctgaagaggtgacctgggagagtgggcttgcgtggatggcatgcgtgaacgaggaagacgggcttcactttgggatcgcacagacaactgacggcggccaggagttagaaacgacctggaaaggcgagaagatcgaatcagcgagccgtctccgcgagctacttactgttgatcctctgtgggatattttccagcttcgtgctgtggtgctgctgctcgaacggctcgagacccagctcgctctgcttcaggagatggaggagatcatcacgaatttacgagaggacgaggcagatttggatttattgttccgacctggaatctttgcctcgattgcccagttccggaccttggaaggggagctgctggagagggctgttgagggcttaataaaacaggtcagcctacctgggtgtcttacagggcccccttcttatttcttgccactgaccacaacacgcagagaactgagctactggcttctcaaacggtggccgattatttcaaagcacaaacaggggagccggacgaacccgaagacttttcatgaatgcgagagcccagattgtgttgatgggtctaaaggccagactgcagagtacagactagacaagcaattaatatcgccacggacatgttcaggcatccgaagcattcctaaacatccacctcctgcccaatctcgttggctagcagcctgcagccagcccagtccccgccagatcatctcaaaaaaggttgggagccccaccgccccctagcgcatcgaactattccatgtgtagagactagcgtccaatgatgacgaaaggacagggaaaagagaggtatgacgttcctagtggaagatcattgagtggaaaaaggggtgaggaataccacgatcgtagggatctacgtactaccggcagtctattaccgtcagtgcgccagttcagattctgcctgcagcccaggttgtaccaatctcgcctcgaatattgtcgaggcgaattttcatgcttaaatgatcaatgcttaaattctgttagtgttacgtgttgtctatatttatctctatactccatagttacttagtatagtattatgatcatcatcataatgcatgtgacttctcgtttcatttatagtttagttatgatgtggaaattacatcttccaacagctaatagaaatacaagtacaaatagaaacaaaatagaacaggcaatggaaaagtaggcgaggtcaaattcaaattcaaatttcaggtattacagggtcaggtgcatgcggggaagccaagccagttacagacacgtccgagaatcaccgggctggcctggcgttttcgtaaacgaactttggccgcgacgatgacgtgaactcggtatgccagcagcgcgcatagtttccagcctacaattggaaatgagggaattggctatggagtccgaagtatgtgcatcgtagctgtccatcgcgaaatctccacccgaacggagcccggtggggccgtgacttataaagtatggttcgctgatttctcggacaaaactcgctggacggaacagaacggcactgtggtaagcttaccgaatgaatacgaggcgtattattaattcttaaattgcccattacgagtgctctagtattgtcgaactatatcccgcgtccttggttgggcgcggatgacaacgactgaatcgcttcagttgataggtgcccaggtggagctagtagcgctagtcatataattcacacaaatcctttgaaactctagttgcatcggattgtttttttttccccgcggttgatcccttgaacgagttcgccactgcagtgaagtctatagattacttcattatctaatttaaaccttgggggctatcccggggatttctcgattctcgtaaattagcgtgggattgggtttgggcgtgggcgagatgacttcaggagacagcgagtggccaacgaataagatggtactttgtgcgcagtatccagggtgttcagtatgcgaaccttggaaggatcgcggagttatctcgtgcgtttttttgagtggaaagtgagacatattaaccgtggatggtggccgatcatcggaccaggatttaataggaagcctagccacacctgcgttaatcgacacgagctgcacaacccgggggaggaagtcggaagcgggttgggaattgcccgcaaccgggtaggattcgagtctgcactctaatatgtagcactcgaaaagtctatctcggtactcgatacagacatgtaacccttcgtttttccatattcccatccgcagataactgctgtccaaagagtagaatgtggagtgcggggaccgggaggatcggatccaaccgttcagacataagaaatgtcgactgcaggaagaatccggggcgagttttgagcggtttacggggtaacaggtatggagcaataccgattattagtttaccatacaccgtccagtttattggaaggctccgaggtcagcaggctccactttccactgactcagcgaccccatcttcccgaaggtcgcccccccccatgtttttaggcttctttctgcatacacccatactggtccaattcaaaccggtgattctttagttgcattgtcctggtgtcaataatccttatacacagtgcctgcgtacactcctggcgcctttcaaatacaaccaactcaacccccggtggcccgtgtgccccttctgcacaacatgcctggtatcttgccgatgaaagtgatcaaggtcggtggcactggcaccacgagccgtattgctcaggcctgtgaccgatgccgcagtaaaaaaatacgctgcgacggcgttcgcccttgctgctcacaatgcgccaacgtgggcttcgagtgccgcaccagcgataaactgagccgccgcgccttcccacggggatataccgagtcgctagaagaacgagtccggagcttggaaacggaggtcaaggacttgaaggatctgttggatgagaaggatgagaagatcgatgtcttgtcccggatacattcgtttacgccaccacaacgagccccttctgcaaggtctccttcagcgtgtgccacagtaaagtcgaatacttcggagtcgtcggatggcatgttccatgtagagcgatcgacgactcgaccatccccacaatcgcagaaccctttcgttggattttctagcacacagggctttgctggtatgttatgcgtttccctttgcaggagacaatcaacttacatgtgcagatgtgtttaccaacaagcttgtccttgaggggaaatcagctactaaggtgccgacaagagccctcactgccttgtctgccttggtattccagggtacccccaaccaggctgtgaagacaccacctcgcttggtgtcggaccagttgattaacatcttcttccaagaatgggcgccgctgtacccggtggtacatcgaccgaccattctaaaagcttatgagcagtatctcaacaacacagagaccctgcagcgtaatccccatgtgatggcccaattgaacctgatttttggtattgctgctctttcatcaatgtcgcgaaccaatcaagacccgactttctttgaagagaattggtcggccacccttgattcgttctcgagtgaaacctccatttccagtctgcagtgcttcgttcttggtcagatttattgcatgaccaaaggcgactaccgcaccctgcttcgctaccgtgccctgggtgtggatatctgccatcagctaggaatgcacgaaaaccaagaaagctcgggaaacccactcgaggacgagacttataagaaggttttctggtcacaatatgtgcttgaccgattctgctccgcgcttactggactgcctgtccttttgcgcgaagaggatatcgagactgagtatccggttgatgtggacgatgagaatgttacagaaacaggctttttgccgaccctgcctggcgaatccactcgcatctccagtgccatcgctctcttcggagctgcacggatcttgaacaaggcccttgcagatctgtacccttcaaaatctggttacgatgtgtgtgtctccaaaatgcgctcggtaacagggcaattggacgagtggcttcacacactgccgccacaccttcgtctcgagttcagtcaggacaagcctagcacgaacgtcacgagtagtcgctcgccgctcctggtaagtccccgcatggattcattaatgttggcagaatactgacctgttatagtcacttgtatactatttcattcgatctttgattcatcgcccagctgtctgctacgctgacgagactcttcgctctcagtctgttctagcggtgtccgattcagcaaagcacatcattcagattcttgaacttcttgatgagaggcgtttgtgtctgtccgtttgtatcaacaggaaagagctcatattcctttccggccttggactcctctggcaaatccttgatatcaagaacgatagcaaactggccaaggatagccagaagctgcttggcactgccatgcaatatctccaatcagagtcgagcgcggcggctgttgaattcaacatgctgtccaacactctgattcctctggacggcggaagacgcccttcagtgagcaatcaacaccaggagatggtggcgccaacacaaaagccccgaaaatcccccaagaagcacttgcaggccctcaagtctcgccttatcgcctgctccacccgcgataagcagcctcccacccaacaaccctctcctcagtcctcccgccgtaacaccatctccggaaccacccccccacttcttccccagtcgctccgctcccctagctggagcagcctgcccctctctcaacctgaccatctttccggcccactctaccacaatgacaaggcgaattctcccttggatctagcctcagaccctcgcttatccgcatccttggggtacgaccactcacgcaacatgtcctgctctacaccctccgacccccaagctggtgtcatcacaatggccgattgggaatatgtgctgagtgacatggaccgcggatactccaacatcttcacaggcatttatggcggcaaagaatgcggcgaagacccgggtccgttcgcctcaattgcagcagaatacaaccgcaaacccaacgatccctccctagtcaaccacgcgcagggtgagatgcacgacctctcgcccgaggcgtggtccgccagtagtggcgacttcgtacataaacaagaacataccgcgcagagcgtcctgagctattcaagcgagagcatgggaagcgccgaggaatctctggcgccttatgccgatgtccgggtctgtcctgaagatatgaatacgatggacccgttccatacttttgctctccatggagaatgagctcgatgagtttctttagtcgatgggtgggaccgactcttgtccgtctgattagttatatagcgctgggtgtctttttggaaggatttgggtttgacgcttttctgttctattcatgatacctgtggatgggggcgttatttgcgtttttttgtttcgatttctgtctggtattttcctccatctgcctttggtcttctctgtttggaaacatttttttgtctgtcgtagtagtacagtatgcttggggataggcgacgtctaagatgtcgtacacatgaatttgatgatgatcaaacactcgtttggacctaatcgcacctgaagtagatccatatgatccatataatattcctacaagcataaacaacacagcgcttcggctcttggtagcaatactttgcccctcgggtcttcctttccctagaggatattgttgtggaacatcgcatggattgtttgaaagagcagctatcctcgtgtagcagctggtcgatgagaatggtccttcataaccaattgcagtttgatccgaggtgttatgccgctgagtcagcgggaaattgagagactccctgagcggcatgattggtaggcctcatagtataatgtatcccagagatatcgttatacttatacttcgaatggtgcaaccacttggagtgaccaaggtcgcgtaaatatccatgggtacacagccagtaagaagcacagggatcggcttccgacaatccctataaatgcctcttcaggggaacatcaatcaccattgatactttatcatctcgaaccgaacctaggttctacatctcctaatctgacgtccacatcaaactcatatcccaaaatgggcgcgtggaaggagatccggcctcggtttttgccagctgtgattaccatgttcctcctccttcaggtccttttcttagtgaacatgtgctatctttatgcaacgcagttccgcagtaccacccgttatcacaacttcaatgtgctctatgttgactatgacggcggtattatcggaaagtcagtgtcagacgcctacaaccaactccaaggcgacgggttcccaaccctgctgccaagatcttctaacgaatatccccagccagaggatattcgcgaagccgtatgccgcggtgagtactgggcggctatttacactacctcggatggatcagctagtctggaatcagcgctggcaaacgggtcaaacccgctgacctcactcacttacatctggaacggggttcgatacccagtgttctcacaggcggcagtctacaccaacatcctgaaactgatagcaaccacccggtcaacatactacgccaacgctgggtcttcaatagtcgcatccgccgacttctctaacgaagccaccctcaaagccttcctcgaccccatccacgctgcagaaatcaacatcaaaggcacgcagcagggcacaagagtcttctacaacacagtctccatggtgattccaatcgtccaacagttcttcttcatcttagcgctgaacgggatctcaactcacctcgacgcattcataaacctatcctggaaaacaaacgtcctgatccgcgcgatagcctccatcctctacaccctcaccggctcactgttaatggccgggtatatctgggcgttccgggagtcgtggggacagcaaggaagtcggttcgttgtgacctgggtcatcatgtggctgttaatgcacatcaacttcctgttcttcgatatcgcgactgcgtttatcccgattcagttcatgccgtttgttgttctgacgtgggctattctcaatgtcgctagcactatcagcccatttgagctgagtcctggattctttcgatggggatatgcgcttccgtcttatgaggcgtaccaggttctggtccagatttggtcggatgggtgcgataatcggctatatcgggcgcttccgattatgttctcttggtggattgttggtgttcctgttgcggtttatgcgatgcggtaccggtgtaggactgctgtggcggcacgggaagtcttggatcgggcgggactggaatgtcagtcggaaggtaaacatgcagtcacgaatgagacggtgctgccgatcagtagctcgggccgcgaatttgagcaccgtgcggactcgattgagcctgttgttcctcttcttcatatcgcttaaatagggagctatcctaatgaaagtggctattgatggtcatcagaatttggaaaacttgaaattgacagaaaagaggaagggtggaagatgacttggttagcgacggtttgaccacctttggaggccacgacccatatttcgaagtacactaattgaccgagattctcccgtaaactctacttacggtgggtaccgtggcatggaacagttggaaacttttgccttccttttgcatagtagattctctgagtcggaggacgattgaatagactatctagcagaagattatgtggtctatgctacccaataagacgtctagtagtaaggactataatttgatcaaataatccggttacgtacttgaacatttgggtttcaaggtccaatagaataatgtaagccctatgtcctagttatatagtaatgtgaataaaagcaaaaatggacatggactatactcagctctcacaaaagtacagctaggaagactatcacacgtttttctgcactcactagtctatttatttatcgagatcactcctggtttgattcaaaccagtcattattgcgaggttgccatgtctggcaatgccaagctttgtggctgccaccgattacatcactacttctccagacctcgggaccccagactaccgcgtggctgtttccccggaatcttcttccttcccacaaaaaacaagaatcgcgggggcccaaacgcggagattttgccaccgaaagtcggggacgtggagtctagggttgacatgccgaccaacagcaacgacgaaccacccgcacaccccgtagccgacccgggagaccttccaaatccggatgatattccccggactatgtctttcttgcggagataagcgacaccgcgaagggcgcgtgctccgggtttcgggtcaacgtgtcatcggtgcgaggcgtccttcccgactcggtaaccatgagtcctcagaacccggcttccgtcactgtgcatgttgcctagccttggctttcttggtcaggcacggttccctataagaaggccaatccggtccggctttgatttcgaaaattcgaaaatcagttgcgaatagcagatactacgggttaagagtactcgctggcgctatgttcgataaaatcctcaaaaagcgtccgcaggacctctatgcagactcccacgtccctgcaaatgaacaggagaatggtcccggtgatgtcgtcgacacgcctattccgctcctcacgtggcggtcgttcattatgggcattctcgtctctatgggcggtttccttttcggttacgacactggtcagatctctggcttcctggagatgaaggacttccttgagcgctatggtgaaattcaatcggatgggacttatcatttcactaatgtccgctcgggtctcattgttgccttggtaagtagttggctctttatcatttattgctcatatgctaacacatccaacctacagctgtcggttggtaccctgattggagctttagtcgcagcaccgatcgccgaccgcttcgggcgaaagtggtgtattagttggtggtctctgatggtgtgtgtcggagtcacgatccagatatcctcgccttctggcaaatggtaccaggttgccatgggccgttgggtcgccggactcggagttggggcagtttctctactcgtacctatgtaccaagccgagtcaggaccgaggcacattcgaggatcattgattaggtatgtcggaagccagccctatggtcattctgtatcgctttctaactcttctcagtacataccagctattcattacacttggaatcttcgttgccaactgtgtcaatttcggaactgaagctcaacccggccccagttcatggcgtatccctatgggtatcacatatatttgggctgcaattcttggtgttggtatggtgttcttccctgaaagtccacgttacgactaccgccatggcaaggtggagaaagctatgaacaccctttccaaagtctatggtatcccttgcaaccaccgcgctctacatatcgagtttgatgagatcagacaaaaacacgaggaagaaaagctcaacgggaaggtaacctggattcagacgttcagtgctccgacgatggcgtaccggatcgctgttggtgtcgctctgcaagctctccagcaactgacgggtgctaattacttcttctattatgtgagttgaatctggtataatacagaggaaatgcaaccaactaacacctactagggaacaacaatcttcaagggcgctgggatccagaacagttatgtcacgcagctgattctaggcgccgtcaactttggatcaacgttcctcggcctctacctaatcgaaaactggggccgacgccgttctcttataaccggtgcgctatggatgttcgtctgcttcatggtcttcgcctcggtgggccatttctctctggaccaagagttcccagagagaacaaaaaccgccggcgtagttatggtagtctttgcctgtcttttcattcttggctttgccagtacctggggtcccatggtatggacgatcgtcgccgagctgtttccttcgcaataccgcgcgcaaggcatgtctctggcgactgcatccaactggctctggaacttcctccttgccttcttcacaccctttattaccggcgctattgacttccgcttcgggtatgtcttcgctggatgtctctttttcgcagcggctctggtttactttgccgttatggagggacaaggccgtactctggaggagatcgatactatgtaccggatgaaagtgaagccgtggaagagctcgaagttccggttccctgctaatccagaccttatccgggcctcattggacaaaaatgagaatgctcctatatcatctcatattgatcttcctactgagattcgagaagatgggtcggcgccggagaggcaagcgcaagcatgagcgcggttgtgcatgtaccaatagtcttgcttgtttttctttcataacatcattttttatttaattggtcggcatatagcttgcaccaatttatattttcaaatatgtcgcattcctaatgtcccgtaggatattctctagagaactggatcaacctcgtctgtagacttcttcacaagaatcccatccaagtaccgggtcagttcgtccacatcgctaagttcacccacccatccgatatattgatccgggcgaacgaccaccagcgccccaagaacccggtcaactccccacttctcatatgctgttccatcgcaatatcgatcaaacatgcatgcatcatcacaccaaatcttgtcatatgcccacccttccactggatcaaatggacgcagaatctctgggaaatcaaagagttctacctctttccacggcgaagcatggatggtaaagacatcaacaggactcttgaatcgaccaggaatctccatgtagcggttgaaaggcaaactgcttgatccagactgtccagccaaaccctgagtcaaagtctcaatgcgttgcttctgcgttgggtttcgaatatctccagccaaaactagaatgcgaaagcgcccatcactttccaacgctcttgttgtccatattgtaccaccaccagcctgattgcgaagctttgccggccggaccctctccccaggaatcatatgccgcgcaaaaggaaatgtagcattatcttcactcttccaaacaagactgctcgcagggtaaaacaccttccatccatcggcaaagtcctcaaacttccccgcaataagagccatatccgacgccttcgtatccgctccaggtttctgatcagtaaatataggcgaccaatggcgatcgaagtcaagcaacatttccgcaagcggatgtctctccaaagcatatgtcccaagaaccttcggcttgagagtacccgccacagcaagagcaaccttccacccaacattaaacccatcctgcatactcatattcatcccaagccccatcttgggtgagtgcgtgtgcaccgcatcaccggcaaggaagatccggttgtcttttgtggattgggtggcgatccgctgtccgacttggtagacagtccaccaactgcattccttgaagttgaaggtgaagggggcgaagatggcttgcacacgttctcggatgagatccgatgtgattttcgagcggtcaaagcggtcggttgcgcccgcttcgcaggtttgcacggggacgtagaagcggactaggccgcgctcgcgtgggatcacgaggatcgtgcctgcggcgttggttacgacgcttagacggcggacgtccgctgtggaaatgttagtgggaagggggtgcacactgcgggtattacttacggaagtcgctgacgggttttacgtctatcacgcccctgtatatgcgttatattagctgctgtagcatgggtgggtaatgtctaccactaaccatatatggtccgtgttcgacccttccacggggatgtttagctgttttctggtccagctatgggctccatcacatccgattagatactttgctctgattgtctcgacctgtgtcttctgtggctttttacgcggggctagatcggcccagtcatcaggaagcaggttactgcggttcacctcgatgccagccacttcggtttcctgtccgcacgacgaattcggatcatcttcgccaagaactctgaccttgacagtgataggatatgcgtcgggatcatcgctcagtttctcgtcgtattccaaagagtcggcgatcacgctccgttccacatcaagatcagagtgctcccgaatactatcgagaaggaaccgctcaatgcgtccctggttcaagcatgtattgtggaagggagactcatcgaccctaaatatgtcaatctgagcctgtcggacaagctttccctccggtccgggaacctatttgttggtatcgtcaggcaagcctctaatattggaaaacaaggtgatacacacccaaatgttcgcctcggtggagatagatccctcttgcataacacgatgctggaaacccatactgtcaaacaactccagcgtgcgcgaacgaagcccgtctgcgtggccttgaaagactttcgtggcacgattgtcgataatgcgtgcgttgactccgtagcgagccatccagtaagccgccataaggccgcatggtccagcaccgatgatgagtctgcgataaatattagactatgttaaataaaggttgggggaacttacacatcggtttgggactgagtagactcttgttctttgtccatcgcgacaggatatatatttctgagcagatgctaaatgatgacccgtagatagagacaagaacgattgtccattcaattcaactatcctttatataaaggaatgtgggcttgctgcgctacatgatcctaaacgagagggccagccccatgtaaagctgactcaagtcacagacaatcctaggattacagaacccaaaatcgatcctaattcaagggtcttccgtgttaatttattcaatagttctcttgtaggctccatatacgacgagatttataccgagcccggatcaatatgccatccatattagtcaggtgccctggtttcctgttgtgacgtggagttccagcagctgagatgagttggcggatttttaatgtgcccatgtagcgcgagctgacctaactgcgatgttgctcaacatgggcttggatgattggctttgagccgggggatttccccgaacgttcccctcacacctcgtcggagttgaggttccgggggtggcgattgcatcgggaggccgtaaactccttgaatgcttattcatggtattgatcaaggaggcaacatgaatgattcgacgcaagcattaccttcagaatttgatattggactggagtttctcatcttttaatcctgggtgacagtgacttcctggggaagcacaacaagggtctgggttgggtgtgtactcagatgggaggttggctgaagacaggctgataccaggcaggcgagcccgacgtacatgctaaacagatatctcgtattttgacagaaaccacaatgcctaggatgtgatcacgtagatgtacagttcagatatacttcgcacgtgactggatgatgtctcccgcgctaactcttcttccggcacaccgagacgttcacgggtgaattcccccgtctcagcgacgacatactgtgggggtcgcgttataaattcccatggattgccattccacttatattcgcagatttatcttgtcattggtgtcacaatgtttcttcggactggcctaattaggaaatccgatgcacggccacgttgacaagtgtcaaggagctgtcaaggagccttcgaggcaggccatcaaagctttttttttcagtcgaccagctgatcatcggcacggttattgaggagtcatagatagaaattcggctaatttccctccgtgaacaggccggttgcgagtcggagcagggtcctccggacggctcccggtgtatactagaaggaggtgtggatggaggagtgtcggaaatgcgggccattgaggtgcagacggaataaacggctattgatgcgtttcgagacaagtgcagaagtggtcgagtgcatgttcatatacaatgtcgttgcttcatacatattcatgccctcgttgatgactcatcccatagggtcgagaggtatagcagctaagcagatacctatacaagtctagagagggcaattggattgatttagcatttcgaacgagacagaaatacccccgtaaatagatttcctccataaattctctgctgaatgcgatctgaactccgtaagctaagttgctgggctgcaggcctccgcctcccccacccgacatcatacccccaccaacaaatacgttcccctccctcttctcttcttctctcattcatctccccaaatcctcccctttactcaaaaatgtacgtactgaactgacttcttgtggttttcctttctaacggtattagaatccgccatcatgggttacactgatctggaccatttggctgtcaacaccatccgtcttctggcggtacgttaatttttcccgggaaaatcgccacgacgttctacgcgctcaatggagctacattggggtcttggacctcatatgaagcttcgatgcgtgcagtctgggaaatctgactaacatttatctcgctattaggttgatgccgttgctaaggccaactccggtcaccccggtgctcctatgggcatggcccccgtggcccacgttctctggaacatgatgaactttaaccccaagaaccccgaatggcctaaccgtgatcgtttcgttctctcgtatgtgctttcctccgtctctgaaagctaggcgggttctttccatgcgaaaaatcaatggccgcgcttttgaataccggctaatctcaaattggataggaacggccacggctgtatgctgcagtatgctctgctccacctgttcggatacaagatctctttggatgacctgaagaacttccgtgtaagtccctccaagccatatacaacagccctgtactcatttcagtagcaactcgacagcatcacccccggtcaccccgaggctcacgacacccccggtattgaggtcaccactggtcctcttggccagggtttcgctaacgctgttggtctcgccatggctcaggctcactccggtggtgtcttcaacaagcccggcttcgagcttttcaacaactacacctacatgttcttcggtgatggttgcgctatggagggtattgccagcgaggctgcctctatggctggtcaccttaagcttggcaacttgattgccatctacgatgacaaccacatctccattggtaagattgactcgagtaccgcaagctagatatgaagggctgacagcttatctctatagatggtgacaccaagtgtgccttcactgaggatgttatgaagcgcttcgaggcctacggctggcacaccgagtgggtcaaggatggtgatcacgacctcgagggtatcgaggctgccatccgcagatgccagcaggttactgacaagccctccgtcatcaagctgaccaccaccattggcttcggctctaagcttgccggtaccggcggtgtccacggcaaccctctcaaggctgaggatgctaagcacgtcaaggcacttttcggattcaaccccgaggagagcttcgttgttccccagcaggtttacgaccagtaccacaagcacgccgcagagggtgctgccaaggagcaggagtggaaccagctcttccagaagtaccaggccgagcacaagaccgagggtgcggacctcgctcgccgtctctccggcaagctgcccgagggctgggagaagaagctccccgtctacaagcctactgatgccgccatcgcttcccgtaagctgtccgaggcctgcctcgaggctatccacgacgtcctccccgagctggtctctggttccgccgatctgactggctccaacaacacccgctggaagaacgccgttgacttccagccccctgaccttggcatcggcgagtgggccggtcgctacgttcgctacggtgtgcgtgagcacgccatggctgccgtcatgaacggtctggctgcctacggtaccatcatccccgccggtggtactttcctgaacttcgtctcatacgctgccggtgccctccgcctctcggctctgtcccgcgtccgtgtcattcacgtcgctacccacgactccatcggtctgggtgaggacggccctactcaccagcctattgagactctggctcacttccgcgccatgcccaactgcatggtctggcgtcccgctgacggcaacgagaccagcgctgcctactactccgccatcacctccaagcacactcctactgtcatggctctgacccgccagaacctgccccagcttgagctctcctctctcgagaacgccctgaagggtggttacgtcgctgtcgacacccccaatgctgccgtcactatcgtgtccactggttccgaggtcagcatcgccattgaggctgccacatacctccaggagaagcacggtgttgctgcccgtgttgtgtccattccttgcttcgaggtcttcgattcccagactaaggagtaccgtctccaggttctgcccgatggcatccccgtgctgtcggtcgaggcctgctgcaccatgggttgggagcgctactcacacgagcagttcggtctgaaccgcttcggtgcttccggtccctacaaggaggtttacgctgtaagttatatccgctcatttgtccatgatcatttactaattatttgcagaaattcgagttcacccccgagggcatcagcaagcgcgctcttgccaccatcgacttctacaagggcgtccccgtgcgctcgcctattaaccgtgctttccagcagatcctgtaagggacggaacgaatatgacgtaacaaaatgttttggtttttttaatagggcaactgccatctagatatacgagaatgcgaataaagcactctattgttcacttatcaatctagtaaccttaacagagtaatcagatgcgtatatttatatctagcagactaaatcacaactcttcccagttcttcttttgcagctccagaacatccctcagcatctcctctttcttcgtcctcttcgcaagagtataagtcccataagcatcttcagtctgcttaacaaccaagtccttccacggctgctcgccctcaatatcaatctggcccaagtcaccccacacatcctgaattgtcggcgcaagcttctggaaaaacgccccaattccaccctctccaccaccagcatgataactctcaaacacaccacttccagcccaccgtgggcccaaactagccttaacaagaatatccaaatcctccgccgagacaaccccctccccaacaagataacacgcctccctcagcaacgcaaaagcaagtctattcccgacaaacccaggcatctccttgttcagcgtgacaggtcggtaatgctgcttagccgatggatctgcactcgagccagcagcaccaacagcagccccaggcccaggaacctcgctgaaatacttcttcacaaactccacctcctcagccttcgtctcaggcccaggcacaacttcaataagcggcatcagatgcggcgggttgaacgggtgcgcgatgaccaaccgctcagcaacaccctcgcacccggctgcctgcgccgacgcggggatcccagatgagctgctccacaggtgtgcatgcgggctagagagactggcgacttccttccagagcgcctgtttcgaagctgtcttttccgggctctgttcctgtacgattgtcgcgttttcgagcgcgacactcaggctggtggctagtttcaggcgcgatgtgcggatcagttcgtcgattatggtggttgattccgggcagtccaggagggaggggagcgtgcttcggatctgggactcgtagtcggggcgtgggtcgtagactgttatgctggtgtcggggcggcgcaggtgcattgctagcattgagaggccgattgtgcctaggcccaagagggcgattcggtgggggtattctgtggccatggttttcggatttcggaggtttcggtttcttgaaggtgtttggaatgggaggagaggaagagggaccttatagatagctacatgtagtttcggggaggtccgccgataagtggggactggaggggctatgcggcgccgccatgcggcggcggctggcggacctcgggaggggattgtctgtcgtgcccaggctctcnnnnnnnnnnnnnnnnnnnnnnnnnnnnnnnnnnnnnnnnnnnnnnnnnnnnnnnnnnnnnnnnnnnnnnnnnnnnnnnccccggaggggggggggggggggcggacctcgggaggggattgtctgtcgtgcctaggctctcatgagactccaacgcgatatgatgagggacatgtcattgaatcaagacgaattggcgtctcgttagaaccggtaagatcaatgtatgaaaccagtcggatattacgcgtatataccttatgtttctggagattctactatttttgatgctgtgtggaaaactgactctacgagtaggttttggcattccttgaagtcacccgacttccattttggggtcaagtccagattgaataatcacaggtcatgaaaatccaactcacatgccacagcacatagaacaatagagcccacagaagaatgggggtggtatactgtttggatgcagagcagcccgaaaaacgctgacccaggataattatattgtctccgtcttatgctcggacggggcgctattttccaagtccgcaaatgcaagccccgtgacttgatcgagttccataagctcatccgcgacgggtaaagattgcccaaaaatattatcccattcaccccagtcgaaattgagccctggatcgatcatgaagggggcgggctcagaagcaggcattgcgttcggtccggcggtgtccaagaagttcaccataggagagttaacgagggattgttgactcgacatagtagcggcggaggaacgaccaaaggctgagtcgggagcaaatgctctgtcgcctgaggatagggggatatttgcggatgacattgatttgaagtaaggtgcatttgcgaaattggttgaccgatcttgccccgtccagggcaattctgggttcagaccggctttctgccaggcctgttggcgcagacgacggatcatgccccaggcctcgcggcctccattcctcaacgggcgttgtgtgaagatgtcatctccgccactcacgacacctccgtccggtccacaaagagacagaatttgatcaacaaatccgcgtgacacggaggcttcggggctatatggtcgttcatacaagtcgatgagaatgatcctagatctagttagcttggccacttaagtcgagctttcgacatacatcattgcatgcatgggctgatggttccttggtgatcattagtcaaattcttatttgaacaatcggaatgctcacccaggccagccccattgaaacggctgaaagtcagggtccgtcgccaatcgaataaacttctccatgaatgcatagcaatggcgtagcgcactatttggattagatccagtagcccaatgagtcgcgacacttacctttgtcgtgctactggccagattcgacttcgagggttcctgaggaatggttgatacgcaacacaaaatgcctacatccatgttagcgccgcacgggattttggcattaaaataccgaccttatcaatgaacaatgacagaatgatcttggtccatttatgaaatgcgacgaggactgctgaatgatattgctccgggcagccagatggaccttcaataggaagttccgcctcggtagaatgagaaactcgttttggagacactactgttctttcggttgccgttgtctctggaattcggtttatgatggagttgagtttgacttgaagatcgtgaaggacagagcggagctccagcatatcccctcttgttagaggcttcgtacccagctgaatctttagtactttacgaacagactctgcgaggaggtcagctcacgcgcctaacatttagacccaagatcactcacgggccattatgcattttgcctttgcgttcagataatacacatttaccatcgacggcccaccacagacagtcggattgtctgggttatcaggtggccgttggccgtcggcaacctgttgttcatatcttttggcttcggcagtacctaataaggtatccttgacctcgctggtctcacgaacgtcccagtaagtcgtatcagtaagcaatggtggaagcccactcgacatcgcaataacggcatccatatgcatgatatgccaccacactcggcgtcggaactctgcctcccatgggtcgatattaaaatgggcgggatcccgatgtaatcccaaggtctgtgccactctcactgctaagctaacaaacaaactacttgccaaaggttcttcctctcttgacaaaattgtctgcgcaacaagataggccgccagaccatgaagtgtgacgctgtggggaaacgaaatcttggccaaccaacaggtgacctcctcgctatactttgtcgagaggacagcgcgtgacgaagtattgaactccgtctccatcgttctcatagaaattgtgactgagcctccaaaccatatcgcgtataggagtggaataaaagaagaactagggcatggctcccccgtatagcttttgccgtcgtaccagtcccaaaaggctttgtaacgtcttaggatcgttggagggtgaacaatagggctcagtgagtggacaccagacatgaaacccttgtagagaatatcactctgccattttgttggaacatgctcaagcatatatggctcgaccgatttatcatttggtgataaataggccgatgggatgcaaacggctttctgaaggggttctgagaagccgacaggaaagggggagcgcgtggttcggctcgtagttcggctgctcatcgattctttccgctgtctttgcttgctagaaacggaatcggttggggtatcactacaggttgctatatcatgcggctgattctggtttccgagcaattgattgagctcctccatttcatgggaaatataagcccaatacgtcgtcccgacatatctaaacccaaggttagaaactcaatcgcactttagcctagtgtgtcgatactgaccttgacctcccgccatcccccaaagacatgtggcccaagtttgaagttcccagtggatcaaccagatccgtagtctggccatttgggatggggaagtcatcgctgctacagtcagcagcagcgctgaatggactgggcggttgcgcgacgatcgatttgctccccaaactgccgtcctccatcggcgccgtttggacgccagtatttaatgcagccgcttgcatctctgtcgattcgttcgcctggttatccttccgtagtcgctcaacgagcgatacgagttgagccaaatgggcttcaactgcgcttaaatctgttttttggccttttgataatgatccctgcctcgctcggtcatggatcggcagggtttcatctgtattttcctccgactgtgggatatctctctgccgtttggctctcactcggcgagtacgtttggctcgcatcccatctttctggatctccgggtcgtaggcgcattcggtaccatttttcgcgcagtttccgcatactgggagtgtctaacaagaaaatttcagttcaggcaacttggtcctaggccagaaaaggttaccttgtcgcatttgactttgcgccgacgacatgtttgacagctataaatcacacgttttcgggtaatgtgtggatttcctggcgccgagggcgaccttggcggttcagtggtgctagacgggttggagggccccaccacaggctgcatattcggcgtgcttcgacaatttatccgtctcttttcattgattccgtccagtgaccaagtagaaggaacatggaaataatcaaagagttacgtgtgggacaatccaacccgcagatgtcggggataattgcgttggtactccgcagtgggaacgatcttggcactctgacgtcgggcccaggttaccaggtggattactcagcacggtctggacgaatcaacctcccacctggaaacacgcatcgattatttgacctaatatgccaattcgttctaaggtcaagaagatctatagggcaagagagtaggttattgcttatgtttgaggatgtccagaagcaaaaaagtcgctcacttcaatacacgacacttgccgatgggcttcatggtcgtaccaatcgatgatacaccaattgtcatgagaaggcacttctgaagaatcgcttctggaattaattgtaatatactgacgtggagtagcacataggctagtagctgtccgagaaatggccaatgttctactcagcaagcgtggttcaatcggctaggcctaatccaatggcctctcattcaatttcaagattggaattttctaattcactaactactcaggcacagtcccgcattccatgaaccatgaacttggcgtgtttgttgtagtttgtcttcccaattccagcaaagccccagaggcaccaaaactggcgacgggaagatgttgtttagccgaagagcaagtccaatgggtggtcttttgtccccagtgtccccagttccgtctactgggcttttcatttattgccagagaaggtgataccaggccaaaattgcggttggtcgagtatggtatggcgttcgggatattggtatagtttgtaggaatagatgtcacctcacatttttgcgccagggcattgtaaaatgtacatttcgcagccgacattggcgataataggtcacgaatatctcccacctatgctttcaaacgaggtacatgtacggagtaggttgtttaagagatagaaaggctgttactgccgttcctgagggcaccttccccactaacccccaccaacccccactgcccggacaatggccgtgctttcgtaacttggaaggaacgatgagacaagtctgagatctattctaatgtgttctcggccgagtgagtcattgttcttgggctagcttctgctccttttgtggacctaagagctaagaagaccgtcgcgacaatgtacaacatacaacaacagggcagggccttgagtctaagcccagttataaggattccacattttacaaagtacatgatatattgtagtcggagtaattgttactgccaatccccatcggaaccatgtcaaatccgttatagcttcatcgtagatctcttgctagcacccaatcagagccagggatggtagatgagatctgggacataatctcacctcatctcaactgcgagcttactctagatctaacaacgggtctaccccactctcggttcagcctcaaagcttatttgtgatcatctccaagtccgagccactgcgtatgttgtatccttatattgtggttgtttttcagctcccctttctcggatgatgacgaaagaagatcgtgattatttatcgtacgacactcgcatgtcacatccgctttcctgtttggctagagcgtggttctcggccggatgcttgttgacagaatggtgccttctcggccgagagaatggcagcagccttctcagtcagctatgtacataactagtcactctgtgagcgcacaaatagttcggcccccgcattctacgaacccgacccgcaacggtataccgagagagttatgatgggtcttcaacaccgaagacttgtatcatgatgaaatttatggagcccagatcgaaaagttcttatcaatcaacttgcaattgtaagtgcatagggctagcatggtgtattttgtgttgacttatccgatcgtcgtggcgttcggtgagtgcccagtgtacaaacctttcgggtttagactccatacaagcttctcattattcttctagtagctagcttctttttcgccacaatgatgacaagcgttgggggccctgcctgcttattcagaacctgcagcctatgtacccgtacgccttccttcacagcccaggataaactagtagaaagtgaaaatatctagggttaacatattcatcgtagttatgcaagtataagaaagaagctagagtatctatgtttctctccggatcgtggcggaccaaagttgttgactatgaaaaggctattcaacgagatgacgtcgtgatgaatctcggccgaacatacatgacaataaagaccgaacctgcttgtagctacactacgaacccaccaattataatcaatttcgaagagctccattaatatctcaagctttgcagttccgcaagtataaaagcagcttctattccccgattcccgccatattcatctacaatccacggtccattcacaccacgtctactcaacttttctgttatttacatcatcaatcatgtcacctcagcaggacagcagactggagagcaagtccattgctcaacctttggccccatttacatacgaaaaccaggtgtaccaagccggtctctcgggccagaagcccccgataaccttcaactgcggcgattgggaagccctggccaaagatcgtctctcggcagattccttcggatatgtttggggttccgccggaactcgtgagacagacgacaacaacaagaaagcttttaagaaatggggaatcgtgccgtcacgcctagtcaagagcggcttcccagaccttaaaacaacacttttcggagagacttttgactatccgatcgccatggcaccggtgggcgtgcagcgaattttccacccggacggagagattgcgtcggcgaaggctgccgagcaggaaaatgtcacctacatcctcagcaccgcatccgctacaagcatcgaggacgttgccaaggctaatggaaacggatctcgttggtatcaactctattggcctctgagtgagaacaacgatatcaccgtgagcctgttgtcacgggcgaaggcgtcgggttataaggtgttggtagtcaccttggatacgtacattcttggatggcgccccagcgatctgaacaatgcatacaaccctttcattcgtgcagacgacattggtgtggcactcggattctcggaccctgtataccgccgcaagttccaagagaagcacggaaaacccattgaagaggacgtccaaacagcagccgcagaatgggcacacaccgtattccctggtctaagtcacggctgggaagatctcaaattcctccaggaacactgggacggtccaattgttctgaagggaatccagacggtggcggacgcgaagaaggctgtcgagtatggcatgcagggaattgttgtctcgaaccacggcggacgccaacaggatggaggtattgcgtctttagatgttttgccagagattgtcgacgccgtcggcaatgatttggaaataatctatgactcaggtgttcggtctggtgccgatatcataaaggcattggcgcttggtgcaaagatggtcttaattggtcgtccatacatttatgggttggccattcagggtgagcagggagtacgccatgtgctaaagagtctcctaggagatttcaatttgaccctccacctgtcggggatcagttccgtgtctcccaagcatctgaaccgatcggtactgcgtcggacgggcaactgaagatttgacaattagatgataagacgatcactccggttatacagtttcagtttgaatatatagaatatgttctttgtattaatatcaagtactatagatctattcaaagggcatgaagacaactgatctgtgcagattcaagagtattctaatacaccatatctcctttcaaaaaggtggagaccttataaatatacagcagagtctatattcattttttcggaggtagcctacgctcatagccagtagtacgttggcgtgccttttgttgcaatggttgagtgtatccggagaagagtccatgatgtaacaatctcaaagattttggcaatatatatcggcggacaccaaccttccattactaggtactgcaaccacgagggcagcctttatcgaaaacctcctttctgttagaagtgaggtgctcggaatatgtatgcctaactcgtcatttgacccattgacgggaagatctagatcgtggggtggaaatataagaaagtggtttctactcccatctagtcggagtatttttccatgtcctcacatagttcctccagatcaacttgatatcatgaggatagttgaccgacgatgtttgtcaggaaatagggcaggaacttgccactaacgtctctccgctagcatagtaagaatgacgaaattttgtaaggttccttccaattttagcaagtaactaggtaactggcgtcagaggcctcaagaataaggccagaaatcggtattgagcctcataaggactctgacataggtgctgtctaacataagcttacgcttctagtctgtgaagtcttgctaatattctcaatttagattcgctcctttgaaatttatccatctatctaccgctccaaattttgtaaagtaacatcaagactcaatgagtagccttcgatatccaacttttaatcactgcagaacagatcctcggcagccctatcacccgtagtaatacaagaccaagagtaatcattgctatcagtcacaacgccagcaccgacattatattgagcacaggtcgtgttgccagcatactggttcagccaatcaacaatatcaccgcccaagttgatgtcttgacccgcgttagacgacacccggcaagacatagcagcactcggctgagatagggcggacaggtcgaccgacgatgttgtgttgtaattctcccgaggcaggttatcgagaatacgacgcacagcactgccaggatggtcacagacttggatatgaatctgctcctcggagcgggtggcgacactgttgatcgcaagtgttcctgtgtccctgatacctctggtgttgagtgtatcctgaccaaggcggaagcccccgtccacgtcagcagcggagctcaattgaagaatgccggggatcaagtccgtcgtggtgatcaagtctccactgctgaggaccacccacgaagctgactggttggtccgaggcgggccaacaggaattggagggctggcgatgcaagtcgtctggtttccggattggaagtcttgaaggcaatggcacagactggagaaccagatgaagcagccgttgcactcggaattggcgtcgacacagcccgcgtcacattgtgagagctgtgctcgcggtatcacgggtgacggcgggggtggagggttgcaggtgatagggcattgtcccgacggtgtaacgcataccaggtcattgggtgatgctgggaaagtcgaagggcatgtacagcccctcacgtcccttctggcaatgtcatcggacgtacacaggcgtccattctgcgtaccattcgtgggatttatgccattcgtggcattgataaatctctgcccgaagaccggagtcgccaggaagagagaaagggtcaatgcaatgcaatgctcatagatcttcattgtgatagatcagaggtcaattaagagcaaaataattgaactaaatctgcttttccagtacagaggcgacttgttgctgaatatttatagcaagaatcaacagaagccatgatgtaaacctgccgtataggtgtgtcagccctatcaacctcacctttaatgcaatcggctctcgtttccgtggagattccaaggttatcgatcttgacgtccaatgaaaacatgtctcacaagaagtacattggatcatcgccgcatatcattgccgtcgtactgttcagtgttcaaaggtccgggggaaccagagattgactcggattcattaaccgccgtctggtgcttgtttcaagagatttatcaagcaagtcattagttagcatgggtgacctaatgaatcaggccgcaaccctaccccggcgttttgcccccaacattccaaattctggggttcttagaatcggattttgcacaatgaaatccataagcaaacacttagagagcataatgcaggactacacggagacaaacagagaatagagtatacgaaaatccatgatttcatttcaatatcgtcatgaggatataaagaccataaaagctttttcaaaaatcgcgagatttagttaccgagcttctggcgggcgaagttgggcagaacaaagctggcgcggtggatgtcctggttgtagtagcggcagagcttcagctcctcctcagcggtccaggtgcgcaggggctcgcgcacgttgcgggtggcgtccttggagcagaccatgaagccaatctggccggaggggtaggtgggaatggtggtgtaggcgtactcggcgacggggaagacctccttgcaggacttcttaagttcggcgatcatgtcaaggtggagccattggttctcggctgttagatataaagcacagctccgcaaaaccgagcccgtaaagcgggttggttgcggggtggtgcgaaagaaatcagcatgtggtcaatttttttttgtgtgataataagatgaagggaatgagcaatcaaggaaggaattgggcaagaaaataagaaagtgacgaacaaccttgggtagtgatgacacctccgtcgcgaagggcagacttcagtagctcaaagtagggcttctggaagaggctctcagcgggaccctctgggtcggagctgtcagtgatgataacatcgaactcgttctggcggttcttgaggaactcgaagccgtcaccaacgtgggtgtgggcattggggtgctggaagccaatggccatgccgggaaggtacttcttggaaacacggatgacagcctcgtcgatgtcgcacagggtggcctccttgacagaggcgtgcttgacgacctcacggaggacaccgccgtcacctccaccaatgaccaggaccttctcggggttagggtgggagttcatggcgaggtgggtgatcatctcctggtaggagaactcatcgcgctcagtgcactggataacgttgtccaggacgagaacggtaccgtagtcgctgctctcgaagacgaggacatcctggtacttagacttctcgtggtggatgatttggttaaccttgaggctcatggcctggccaggccacatgccggacttctcagagaaccagccatctgtagatgggcgtcagcatgttcttgcagcaaattgactagtaggcggggtaatggaggggcttcacacgtaccctgaatggtggggtgggtgagctcgctcattttgatagagaaagaagagaaacaacggagaaatttagatgatgagtagaaagcagaagagagtctggggagacgaagcattcgaagaaaaagggcacggcggaagttttgctgttttgggcgaattttttgcttcttctcggcttaagtggggaaccgctgctgtgctgccaccaaaacccaatatccgtagaaacaggatgaaacccatcttaatgaagataataggtatgggttgcctctagtaacccttaattgactgcaattcgacccggtacacatgccccatacccataattgggtatggacacctcagggaccaatagagagcccgagaaagacgcttactcaggcttgcctttgaatataagaaaatagagccctttcaagcgcaaaaatatggtaggtaaaaggaaaatcaaacggtcgattgctttctagttactgtacaagcatacagctcccccaaagtgcagagtcttgggtgttcatgctctgttataccaatccaacctcactccacgaaacaaaattgaaataatttactcttcattgtcaccctcgagaagacggccgggcttggagttcaggaactcgttgctaaagcaccaaattagcgcacagtcgaagcggctcctaagggcattcttaccgctcaatggcccagttcatggcgacgtatgcgataatgaaggggggagcaacgtaaagaacctggtggcggaaacgacggaagacgttgaagatagcagcgtgggcggcaccggccatgggacgctgacggttaggggacagcgagtaggtggcgatgcgctggggagtcgggcaacctgtaacatggatattagcgatccgctcgaattgcaatctcctttatttctctgaatatgtctagatcgatccgatcttcatatcgcataaggggtcggcctcctgcgtatgcatccggtccatagaggttcaagggttattgtcgaacgtaccgaactctccccagttgccgatgtagctataagaagtaaaaattgtcagttaactgaatgagagacgcagaatacgcagagactgttaaagcccgacccaattggcatctttaggaatttgaattgtgtagccgggcggccaacgcatccgggaggccggtactcaatccacgacgccaggagcatgggcaaaacgacttactggccgttcttgggatctacggagtgacccattttgaaagattccgagtaaaaagagaggagtgggtggaaaaggtatggaggtagcgaaatgagtgaggaaaagacgaaggtcgggcgaagttggaggtttggaaagatgggcactaaacccaatcgggaacactcagagtgagcgtcgggaaaagcagacatcatctccatcatccgtcttcatcaactcgacttccacctccaaccatggctcaagtcctccaaaatgtttatcggctggctgtccccgtggctatcggtggtatgctagttcaaaattccctttacgatgtcaaaggcggcacacgagctgtcatcttcgatcgagtgtctggtgtgcaagagaaggttgtcaacgaaggaacacatttcttgatcccatggttgcaacgcgcaattgtttacgatgtccgcaccaagcctcgcaacatctctaccacgacaggaagtaaggatttgcagatggttagcttgacgctgcgtgtgttgcaccgcccggaggtgccgaagctgccgcagatctaccaggtgtgtatctcatatgatctctcaacagatacctaagggaaagactgacccagagttatccagtcatacggtaccgattacgatgagcgtgtcctcccgtccatcggaaacgaagtcctcaaggccatcgtggcccagttcgacgccgccgagctgatcacacagcgtgaagctgtttccaaccgtatccgcactgacttgatgaagcgtgctggacaattcaacatcgccctcgaggacgtctccattacacacatgaccttcggaaaggagttcacacgggctgtcgagcagaagcagatcgcccagcaggatgccgagcgggcccgattcattgtcgagcgtgccgagcaggagcgccaggccaacgtcattcgcgctgagggtgaagccctgagtgctgaaattatcagcaaggccgtcgctaaggctggcagcggactgattgagatccgtcgtatcgaggccagcagggagatcgcccagactctgtcctcgaaccccaacgttacttacctgcccggtggagaaggaaaggatggaaacaagagcactagcctcttgctcggtctgcggagttaggaggttataaggctgtttcggggatttatgggccccgttttcacaactcatcgaatgtaccaattaatcgcaatttttgccgcgacttggggccagtcttgcctcgtgccgtgaatttggagtggtctgaactataccaccttcctatctgtagcaataccatacctcactccacaccacttctcttttagaaaaaacattctgaaaactcaatcgtattgctcattaaatggttaaatggtgatttatatcgtgatatagaaaacatcagatctacaaacgtcgatacacgtgcatttggaagcgcatgtcttccaagcctgctccttcgccaacttcataccgcagacgcactgcgtcccgtctccaccacctcgagtcctgagtgtatacgcactcccacttgcccttcgccacagacagcagcgtgtggtcaagcaagaacttcatcggatagttcctctcttgtggttcaccgtccggtccttttcctaacttcaaagttgaatagctgccaggactatcaacaaccaaaagcaccgcaccagcaggaaggatttccgtcattttgagcaaaaaaccggtagtctttggcatggaggtagaaaagagctcattcaaagtgaacatgataggaacgaggacggaagtgaaaggagaagacgaggaagggccgaggagaatttctttgaggtcctcctcgggaagagtcaggacatctccgcggcggaaagacacggagaatgtttcactggccactttctctaagagcaaggggggacgatattttgttgtctgcgaaaatggcacatcggacgaagtgatggttcgtgaaagcctgtcaacaacgtctgcccagtttccgatatcgacagccatgacagagagactgggtgcgctgactccttgatctccttcttctgtcttcttctcatcttgagattccatatctttgttttcaagagacacgctggcaataccttcctctagcgactgggcttgggaccccatgtctctccacgcagctgcaagagcagcgatctctgcaccggctccgccaccaatcgacacaacacgggtgcagggattcttgcttctagcacggcctcgcgtgttttcctcctcctctttcatccaagtcaaaactcccttcaacaggcctgcatatcccagtgaccgggacgcactccagcgcagggcatatgcgcgcagtagatcctcgcctgcctcggtgaaggcagagtcgaaatcgcgctgatatagaagtcccttgattgtctggatgagagatttaatatctaatggttcatctttattttcgtctgattgcgattcagtgaggttggtatcctggcttgcaggttccgattctgcaactgggttgcccaggagggctgttttgaatacgtccaagagcagttgctggagggtaagaggaattgtgctaacaaggttaagtccagaggactgttcttcctcttgttgttcggcttcggctttggctttttcgacttcggctttgcgattggcgtgctgtttgttcgctggtggcgcttgtttttgcttttgcgctttcgcttttggacctggagatctcctgcggtttccctgacgtggggcgtgaggcattattatattcgagaagacactcgtttcgtctagtcctttgtaaagaatatgactgtcttcatcgaacgtggggtggaattttgcactttttttccttatcgttatcggcgactccactataaaggtctataaaccccccgatctgtattcgacttgattgttggacttgttcgaaaattttacccttaaactttggcgaaatatgatggctagatgtatactcgcccttgttgcattacatgagcttgtctccatcaagccttgttgaataatgatcactatggaaatccttctagtccagagtaaaagcgccgagcacgtaagcgtcctaaatacaatcaattggacaaaatatgttgatgataaactacaaaaccctggctgagctcctctcgatcaatttgctacagtgatgatatagaatccctatcatacgacgttgacgctgtatatcgacgcagggttgtcaagacactgcatattctccaaggaaaagccacatgctgacaataaataaactaaaatatacatgactacaaacgtgatcaatatctcaacttggaatttgtgcaccataggaggcttgacagagagagttgtcgccctgccaacatggcccggcgcagctgggcaatactgaattgaaacaccaaacctgacagtttaggggttcaaaacaccccattatgttgcctctcagtaagccttgctgatctgaaaagctatgaagactgactgtgccaactattttcctaaaaataggacactttggtcgctagtacgaaagaaacactcattcccccaggattacgtgtgacatatctgtgtccgagttggtttagctactcatatatagctattacattatacgtcactaagtatatcgaaccgtgcacgtttcatagtcagggtcgggcgtcaagaaggcaataagtaaagatatatgtgcgttgcaccagagaatatatttcgtcggtcattattgccaaccttgcatttcatctccacggagagctcttttgtgataggcaaccaatagaagaaacaagctacacggatacatggcgtgctatatattttgtccttattattaccaaaccaacttctgcctagagcactgcccacatctatgagattccacgagattccaaactctcatccaaagccacatgaagacaggaggagagttttacctgatcaacacgataccaacgtaccaatgccgtccgtcatatgatctcgctcgcgtcgagtcgagagccgaacgcgcgctccacgtaagaatgagtcacagactagtgctgtaagccaaggagtcataactatccgttgcccgagcgtactatcatgcctcatagcctataggccgccgtgggaagcagcgggctccgttgggagcccgtcaacnnnnnnnnnnnnnnnnnnnnnnnnnnnnnnnnnnnnnnnnnnnnnnnnnnnnnnnnnnnnnnnnnnnnnnnnnnnnnnnnnnnnnnnnnnnnnnnnnnnnnnnnnnnnnnnnnnnnnnnnnnnnnnnnnnnnnnnnnnnnnnnnnnnnnnnnnnnnnnnnnnnnnnnnnnnnnnnnnnnnnnnnnnnnnnnnnnnnnnnnnnnnnnnnnnnnnnnnnnnnnnnnnnnnnnnnnnnnnnnnnnnnnnnnnnnnnnnnnnnnnnnnnnnnnnnnnnnnnnnnnnnnnnnnnnnnnnnnnnnnnnnnnnnnnnnnnnnnnnnnnnnnnnnnnnnnnnnnnnnnnnnnnnnnnnnnnnnnnnnnnnnnnnnnnnnnnnnnnnnnnnnnnnnnnnnnnnnnnnnnnnnnnnnnnnnnnnnnnnnnnnnnnnnnnnnnnnnnnnnnnnnnnnnnnnnnnnnnnnnnnnnnnnnnngagcccgtcaacggcggtcttatctcccgactccgacattctagatgtggatgccgccagcggggccgcacggtctcagagacggccgtgctcacgaaggtctcacgagagcttcgtgggtctacgaggcgatgggacacgggttgaaagtggtgtggctgaaatgtctgcctgagaactatcgctatagcgtggaagcctgggtgcctcaggaataaatacttgttcacgcccatgaacatcattggctgccttatacttcggctgtgcatcccgaattcaatgccacgaagatccatcgcgtttcagtgttagcagatggcctcttgaggatacagagtatagataggataatttgaaacatatgaccatatcaagaagatattattcgtacaatttgtcaatcaggaacaaagcgaactaaacgtggagttggttggtagaagcgagtaacgcaaaggatacatcgaaccaaacatccgggtatatgaggcgagataacgctgtaaaccgcctctggagacaacaccgcctggcccatacgaaatcatcaagctaaaacgccgtaaagagggaaggtctccctgaattctcaaatctttgcagaaagcaaagaaagcaacttgtgctcagaggatatccatggagaccgaacccaaatgctacacaaaacaagagggaaagcaaagtaaaaagaaaccaccaaacaaaacgaaaagaaggaaatgtcgcaaattttttgaagcgcatttactgcctcgataaacgcccacaagatgcataggtcaaatccgtagacgtttcaatctgagaaaagcaacccctaaacgggaggggccgcagcagactggggagcgggctgtgaaagatcctggagttcgggcacgggaggagactgctgagggatagcctgctgaatagtggtgacgattcgctccagctcttcaaggcgacgatccttctcttcgatttcccggcgaagtctcttaacttcgttgtgcaaatcgattccggtcacaggcagatcccggagatctccgctgggagaatcgtggcgccgcttcattccagcaataggaagaggtgaggcacccgtggctccctcgacaccttcaagttcaggggggcggtcccaagacatatcgaccatggcaggagcctcgtcattgtgcatgtggcggcggcgaagatgttcgcgcaaattttcttggcgcgtgaatccattaccagtgctgcggttgcaatcagtgtatgggcacatcagggccttcttggtgtcggtgtttttcttgtgaacttcgcgctggtgacgtaggagaccaccagagtaggtgaaaccttggattttgtcacagttaggttcgtaacacttgtagggacgatcatgtttgtccatgtgtttgctacagttctgttagtactgggcgcgttaagaacacaacaatatgacattttacttacttccattcgcatggacgtcggaaagtaggaggcgcagattgacactcaacatgatcgcaaaaaatttgaccttcagcgttcttaggaggatcgcgagcgcgtcgaacagaaaggcgcgggcgcgcgccctcgaggccgtaggtcataggctgctgagggtcgttcattctggcaattgggggtgaggattcaggtttagaggcgaggattgacgcagcgagggcaccgtcaattccttcacttcgtgggctaggatagtcagacccgtcgcccatattttgaagttgataccccacactactgaggggatggtgatagaatgaagtagataccggaaagacgcgtcgtcaatgcacaacaacggtaaatttagaaacacagagtaatggggtcgatggaaacaacaagaatagagttgtttatgaaaaaattcaaataaattggccgtgatagcctagtagatgttgatgggtaaggcttcgggagaagatggaggagttgccaaaattttcaggtagcaaggcatccgcagcctatttataccgcttgcgtcaggtgcatatgcgccacccctgtggcgcagtaatccttattatatcagcaaatttttgcttctttcgtttcctagtggagtttctgggcaactagattgtcatatgaattcataactggctagagtttatatacatgtgggttaagatgtggaaagccgtctattaatgcctggtggtcggatatcgagatgagggggcaaggaagcaagtgactcataccctagagagataccgtgggtatgactgtgtactatgtacggagtacggccaatcctgttgccgtcggcgggcccaatttaggtatcaaagcaagattgcctgtcaggcagctgtccactgtcctctgctcaggtggaacaatatttgatgttgccacagattctgacaaatttagtggcggtgaattcacgtgatacgtagtgattggtccaacccaaatcacgtgcgtatcaaatataaatcgcttatctaagcattggatcgggcagcaccagggcagtgcctttttgcaatgtacgttcgccatgcccgatgttaggctacaacaaactttttatgcttgacaaactttagaattgaatgaactgcacgtccatgtagttgattgttactattaaaaggaatacgataaggtttcatgtagtaggctttgacaacttcaaccaggcgatgcaagctcgcttaagaaggatgtcggacgttctacaggattccaaagtatgtaccctataaacaacgtagttcatatggatatgcattaaggccaagatattgggaatcttgaagcctacaaatgatcctacaaatcgataatactaggaaattttgccacacagtgaatatggcttttataccatcttcatagagaaaatgaatggcaagatgcaatcattccactccaagactatgctacagggcagtatagggacttttgaatagtatgtcatttgtttcatacaacatggagaactaccaaggagatgaattataaaggctagctaacccccacctctatcatattaatagaacagcatttgatactacctgagcctaaatgcacgttggcctacttctgagtaaattgctgcccatttgagcatgttgttcgaccaagcaatggactatactacaacatagcctccagatcttccgaaagatgatgcccaaatcgctaaagtagccaccattcgacgtggaccaacaggcacaggtgtaattgaccacagatacccacatttacgtcaaattttcaatgagttcatcgcggtgtcaaggtgagatgtccctagtgcttccgtagccccaccgggtagttcgaaggtatatccggcgctcattctgaatattttacttgcattttctctcttcagccagttattctagatcctaagatgccatggaattatcaagcaatataaataatcgacacattcttcgatatgtggtttggcacgtgaattgcatctggcattatttcgttgcggcatttgtgctacaggctcgggaaccatgctctgctccaccaacctcacaacttggcgcccttcgaatttttatatccaaagttgcatacgttcattcgtgccaattgtaataagatcctaacacgctagggcacgaataatatgcgccattcatttttactccatcggggtcgaggcctttgctgggcatccagacgcgccttcagtggcgctactcatgcacaagcctgccatacagagaaaaagcagtgctcaaagagcatcgagcgcgagcaaaagttatctcaagccccaaaatgtgccaaaactccgcccttgcaaccccttccgacgctcagtcttccattttggacctgcagatctacctggaaacgagcagggatcaataccctccgctgtttggtgggatgtacaaccggtgatttctcctcgctatggatcctacagacctactaccccgagatgggtatgagcagcgcaatggccttgtcgagtgggttgcctccttgaacggatctaattgtattgggtcttgcgtgctaagaataatcatctagtggcatgcggtatcacgacttcagttatcctcgagacaattctgctccgccggggggctgaccagctttcctggccgatggccgctcgtactgctatgggcatgagtatggtttcaatgttggccatggaactagctgagaatgcagttgactatcatctgaccggtggggtagttgctcttggagatccaaatttctggctggcggcaatgttatcgatcggtgctgggtatttggcgccgttgccgtataactatctgcgtcttcgaaaatatgggaaatcttgtcactaatctccatgtacctatgtagtttgctcacctttacggaacaaatcagtttaatcaactggttcttttgtttatgttgaataccctggctgattgagataatccatttataggcggaggcgttagataactcggaggataagctgacttactgtttttttgtctatttcttacttacgatacggaaagaagggtggaatcataattggcattgtttgtttaagctaatacctgactatctaggatataaagatatcaagtatgacacatggccaaggggtaggggtaaatccacagaattgcacggtaattgctaccgaggttatctgagctgggcatcgacaatcgacgggtgagttttcagtaattccttcaaccggaagatacttgaggatcattgtctgtggcttcatccctgaaagtcacgccttgtaaaattccacggtgacaatggtgagggttcagacccagggaacaatccttcgacggacagaacggtgctctggtagcaggtcaaaaggacccggggataagcatccgaacaatcttggggttgccgatccaaagtcctggtcggcataaaagaaacgggcgagcaaactctactggaaagaaccctgatagtatgcacggacattgcttcgccgagtggtaagacgggcgaacctgttaaaggttgccctgggaaatgttggacacaaaagtcactcagtcatagttgccaccaacttggctagcgaaagcagtagagacgctacgggcatcatcgtcgtcgtgcgtgttttggcccggcacgccgcgagtcactcgaatgctagcggagctgcctccgaagatgctgccgttgtccggaactccagccctgtaaggctcgcgtcctccagactcgacatagcgcttcaaacggtcagattgactgagactgggctgcttgcccatttcattaatgctcaggccagtgagactgacaccgccttgatcaacgctccgtccgtcagtgacgctggatgtgacatcggactcagtggcagcgactgactcgccagccacactgggggctcccttgggtcggccaccgttcgctcgacgaccgccagagatcgcaggccaggactcgccaaaattctggaacataggggggtagccagatggaaggccaacaccaccaagtgccgagccatgaacagaagatacatcgtcagggatatagcccaccacagaccccgagtcatgatactcgttgcggtgaccaccgttgcgaccattcactgcattatttgggccattatttgtctgactgaaagacatctggaaccgctgcgggcctctgtatgcttgcttgggccggctgaattgaatcaaggactcctgaaggttggaaagcggcccctccacaagacagtggcgttccttgaagtgctgcaaaaggcaattccacaatgggtgcttagacaagaccttggggtttccgaggatgaccaggccaaatcgagcacgagtaagggccacgttgagacgacggggatcgctcaggaaaccaataccttggtgatcattagaacgaacacaagaaaggataatataatccttctctctgccttggaatgcgtcgaccgacgcaacctcgatctccttgtaatgttctttcttgaaggtaccgtttgcctgcatagagctgacgatgtagctccgctgtccctcgtatggagtgatgataccaatatccctaggctgaacacctgccttgaagaagcgagtgacaatcttctcgacgttggtagcttcagtacggttaagatacgaggtgccagacgcggagatttcttcgttgcccaggtttgaccaaaacatcatcggatcatcaatgatgggccaagggaagtcaacgtcacggcggacacgatctgcaatggtgataccgttctgcagcgagccttcatagaacatattggatgggaattcggaaaggcacgggtgcatacgatactggacattcaatcggataggagagcagcccaaaatcacgagacgctcgaacaaagactggttcagaccggccttggcggccttcttgttcatgatcacagggccaagttgctggtgatcacctaccaagaccacttgtttgcagcccagaactagaggaatcatacactcgggctcagcagattgggttgattcgtcaatcaggacagtgcggaacttgccctttgaaagacgaggatcacctgcaccaacacaagtacagcagatcacatctgcgttagtgagaatttcacgctcagcagagcgagtaagttgcttcaggcgcttttcgtcttggctggacaattccccaagttctgccttgagctggttgagttttaccagctcaatgttgctatcgttcatgcgaacctgctcgtgcagcgaaaggaaaccaacggcagattccacatcttcgcgagatttagcagtaactcgcacggtcttgagacccgtccggtgaatacgttcgcagagctgatcaacggcgacgttggatggagcgcagacaagaacttgacctccgttgatcttggcaagatgatagataatagtggccgatgtaacagtcttaccggttccgggaggaccttggatcaaactgagaggtcgttggaggacacttttaactgcgttaatttgactgccattcagatctggtagacctggaacactaaatttctttggaatctgggtcttcataggagctgcagcaacctcatggccaaggagacgatggaaaatgtatcctgagacactctgctcatctacggcaaaggtcttcatagcacattgcatgcggtcgaaggaagtcgacttccagacatagtcggccataaaattgtgcgtgcattcggtgggaactgacttgtggtcgcccttggcgcgaagttcgatagtgacctcatcagattgattgttcggaatcttgatgacatacccgacaccctcccacttaggacgcaattcaccattgtacttgatgcgcatctcgtcacccactgccaatttgacatctcctagctcaagcttaggcagcacaaagcttgctagatgcttgttgttgagaccaagatcccagcgcacgatcaatccatcttgggattgagattccttcaacttgcggtcgtaatcagcctcgatcttaacaagtgggccgaaaatattttggtattggaaagcatcgtcgtagcgaagtaggactggcgcaggctcatcatccactgcggtggccttctctaggtcttccagagtcgcctgagagttgtctttccacatttcctccagcttcgcaatcaattgaggactgaggtgacgagctcggagttgttcttggtcagtaggtgctcctacgagccaggggaggaaagaacgatcctcaataagaggctgccatcgtgaagtgtcccaattcatgtccttggaggatggcatagaggcacatggctgccgacaaagcaggacaacaacagtatcggattttgcggggatgaagccaagcaaaaatacatttttggtgccacagttgtagcattccagaatagtatctcctaaagaagagcccgggtggagttggacttccttatgacgagctcggacaaggtgattgacgatatgggacgaagaagtattgccacgtgcactgcagaaccacttattgcaagcaagacatttgacgacgctgctcgcgttgtggatgccgcagtatctataacataatcagtaaatgcgatccactaagggaatataaacactgacgcgcatgcatgagcagggagctctatttcctcctctccatttccttgggacttctgattcccatttgcgggtacaccgactgtgctttccatgtcgtcatcttcaaaggtttcagagccttcatcttcgtcatcatgtcggcgtggacgtgcgcgcccaagtgcaatctcattaacgtcaactcccgccgaggggtcctccggttggtagctcattatggataccgatttggaacgctgatagggatgactggagctgatcaagattcaaagcaaaaagcgaagcaaaaagcagttgaaatcagaaatgaacttcgcagtcgtaagcgatttaaggagcgtagaggacaatccggtcgtcctatgggggtgttcaaggtttaaaatctccagggtgtgcctgaggggcaaatggatggagatctatatcaagatgtacgattagcgatagattattgagaaggacaggtgagcacatacaaccagtccagctctctgtgtcagaggaccgacaaaagagagtcgatgagtttgtcttgaaggatgagcaaaaagtgttctccaatagcccagattctttatcggtgggatcccactacggcgtcccgtaccaaccataaacgcagccccggagttaagagaaaaaaaaagttgcccgctcttctttgcttaagccacttttactcaatcttcaatatgctggtaagtgaaggatagatttgacatatttgacattatgacttacaatcagtagcgccgccaaactcgcgagcgccgggattatctctatcggagagctttgctactccgtgatgcctcgattgcagaaaaaagatcccaactcaaggcttcattggcttctggaaagcctctagatcctacaattgcaaatgataaatcgcttcgggaagacttcaaatatgacgaatcgaagggaaatgaagacgctgagatggacatcgatgatgaatatgttttaacctccggcattatcgacccccgtcctctggttaccacatctcgctcaccctccgctcgtctcggcgcatttgcgaaagaaattcgccttctccttcctacctccattcgcctcaatcgtggaactctcgttcttggagatctcgtctccagcgcaacctccgcggctctgaccgatatgattctcctccacgaacaccgtggtaccccgactgcactcacgatttcacatcttccccacggcccgactgccagcttttcccttcacaacgttgtccttcgtcaggatattccgaatgccgcccgtggtaccgtgtcggaaagctacccgcacttggtttttgagggattcaagacgaagctgggtgcccgcgttgttcagattctgaagcaccttttccctccgcgcgagaccggaaaggttggcaaccgtgttgttacctttgtgaacaaggacgacaatatcgaagtgcggcaccatgttttcgttaagactgggtaccgggatgtagagttggccgaagttggacctcgcatgacaatgcgccttttcgagatccgcggaggtactctggagaagggctcgagtggcgacatcgaatgggcccttacccaatacacaaggaccagcaaaaagaaggaatacctatgattctttacgaactcgcatcaggctgtggtgtggatggttcaggcaaaattcaatcccatcattgttggtcgactggcgtatatggcgttagagggcacttagaatgggttcttttgtaagttagttatgatttaaatggcagtggagaatgtctaatcaaaatattaaagacatgtacagcagctttttgagaccgtggttgccgctctgtactttacgagactatgtgtatattattctagcatactggtccctccttggagctggagtgaccattgactttctagggctaaatatgcagcgtgacccgcatcccccacttttacttctatcaccttgatgttgtaggacgaagcctgtgttcgtttgccttacttacgatataatttcatctttagcggacagctagcagcttatatattgcccgtagatctaaattgatcaactccagcatgccaacacggaagggcttatcaagtttgatgagattcgcgaattaggcctcatcgctgtcctcctactcaatgggaaacagtgaccaaggatgcgacaggttgggaaaggattgtttccgatgaatccgttggccatttttcatattcattttaagttgtaccggtactttgagaatatctgccatcagttcacccagcacagtaatctcacaagtactatcgaactttctatatgatcttggaatatcactcattttgaacagccccatctcatgtttcataaaaggagacggcacttgtctaagcgtgacaccatccatatgtagtatgattggtttcataattatcatgggaagcatttctgaaagcacgagaatagagggcatgtgtattacgtgttgttctaaaatcatcgaaattgcattcggcataaaacctgctcttggcgtgacctgtccatgtgcatcggggaattcactcatgagtgcaggtgttaaccacctggagggattgccatcatccttaagtactacccatcgatttcctccttcgcctcatcatcatcatcatcaacttcacatccgtcttcaccaccatccttgacttgatgatttgccatcttttcctcgatactatcctccttgataccgtcgcatgcgatgtcgcttgatccttggcaggctgtgctctggggttccttgagaaatgcaccaaggatagtcgtcttttcctcgagatagaaccaaccctcgtgaacaggcaacgtgcttccgtccatgtcgatctttgggggtggcatctttccatttgccctctcgtcccattccttgccagtctgttctttgaaaaactgcttgaatttgtccacggcaatctcaagcttaccccttggccccgcaagaagttcaacattggatatgccaacgcgactgaatttggcgtaggtcgagtaggtgtgtggttcggcagtagattcgaaaagctaggtaatctcaatacctttttcttggacgtattcacagaacatctcaaattacttacagtcaattggtatttttccctgctagtgactggtggtcttgatgggcggaataaggtgatgctgtaaaccacacttgtctttctgtcctggtaaacctgacgcacggctgtgatgggtaaatattagacctgtatatgtcatctgagaatcgtgcttacgctttcttttgccctttgggtcgatgaaaggatcggctgtagatgacatatcagtaccgtccgcattatagcaataaatgaagcttcggaaaaccagtacctatccgacgtttcggaatctttgttttgatctccctcaccacctttggggacttagacttcggtgtgaccttgtttttctggggttccttattctcgggcttcatcagattcttcagaagatatggtccctcaggctttggccggcgtgtgtctgatagcaacgagtcttcaagccaatcatatgagacgattttgacggtaccgatattctgagcagtctccactgtatgttgttgattaacttaaggtctttgaacgatttaagtgtaatatacctggaactgcatggctcttgaatgcctcctttgttgcaatgagatgagtgactcgcgggttcacgtctctcgagaactgccctccatttgcccgaatccactgtgggatcttttcgccgatgccgtcttggaacttgccgactatagaggcatgaatcctttggaacgtcttccccattttgagttcacactgctgtctgagaattgactggatgagtctggtgtttccgtatcactggcagcggaatttccacttagaatggcctcaatatgagatatgtgatgctgtcaggaggggagactggaacaccgcaaggaccagttttataggcaagaggcttgcttcagttggtctttgctagctgtagcaatatgtcagaaatgaagtgtgtatattgctggaaagcaagtctttgagagataatgactgagagggctagtttgatgatgcccagcctcgtttgagctctgatgttgaccgcgatgtcgttcagaaagtgcgagaagaacctcagaaatgagatatttctattaccaggggacaagacttcgaggcaataatgtgatatactgcacagagctgtcaacttggtctgcttttgcaatgttgatatggaatgcactaagcatgatgatttctagagggtgaaagtgatgagaaagtataaaatgggatttcgaaggcaattaaagacgcagatctactccaagaaaggatcaaaattcattcctgttggatatccactatagccttgatcaaacaagtcaaattaaagtgatactagaaagaaagaaatcataagtttgattgctatggatattgttcattatcggatatgcaaccccggaatggaatgagataagaagtcattctaagtaatgtcatacacgttcctaactagttcattgccgaatgcttttggcagacttgacaaatgctcgaattttctccaaattttgagcgccgtttgtctctacgcctgagctgacatccaatccgaccactttgtggcccgactggcccagctttttcaccgtgtcgaccacgttgtccgggtttagccctccagccaggattaccctcaatccatcgtcactatcgaggacctttttgaccccgccctcctcgagaagctcgccagagcctccggcaccagagtccagtaatggaagagtgtggtatgctctgcgagcaatgccaatgtcaccaggagcgaacttgcgaatgacaggaactggaatcaaactagaccattccaatggctcagacccatgcagttgcacaacatcgagatccaacttttgttgttgagaaatgacatatgacaacggctgattcatgaacacgcccacgagcaaagcacgagaagggtgacgcaagatattagtagagtgatcaaaccattccaatggtgtagcgttcgacgactgctgcaatgtattggccgaacgaggggtcgacttaaccacccgggaaatgccgagggccacatcatccgagacaagtcgtgagcgcccctgaaccatgataatgccaatcaaatctgcaccagcttggatagcagccagagctccttcttcagtccgagttccacatattttcaccaacggggaacttggtgtagcaccagcagattttcgattggagccgccgagaagctgtgccacaaaggcggaggtatcaggtgccctcataagagcctctccaacaagaatggccttaacaccttctttcttataagcctccacatcctggggccccgagattccactaagggcacacacaattgtgctctcaggcacttgatccattaggcgactggtagttccgagatcgacctcgaagcttgtcaggtcccggttgttgacaccgatgacttcagaccccaggtcaactgcaatcttcatctcttcgggggtgttgacttcgaccaggggctccatgccgagactgcgtgagtaatggtacagtctagtcaacagctcaatgtccagcatcttcacaatgagtagaactgtatcagctccagccaaacgcgcctccaggatttgatactcgtcaaaaacgaactcctttcggaggacagctggtcggttggtgagtccctccaggctctggcgaacagcccgcaggtcatctatggtgcccttgaaccactccggctctgtgaggacagaaatgacgctagcgccagctttggcgtactcccgcgcttgagcaggggcacatacatcagccgagatgatgccctttgagggtgatgcacgcttgatctctgccataagtgaaagaggatagtctgactgtctcaggcgctcagggaatgacagctgaggaggcgcaatgttcagatcatacgcggcttgaagagcctctggccgcagagccggaattttcttctgctcgtcaacagcaattttgcgatgagcgtaaatcttatccaaaatggatagcttcttgtctactggtgcggcggcggctgctccctgcttgttatcccaggtcccagtggtgagctctaagaagtttcggaacatcttgcgcccgtattccgtcaaaatactctcagggtggaactgaacaccttccactgcgaactccttgtgtctaatacccataatgatgttcttgccactaccgtcccccagctcaactcgcgaggtcacctccaagcaatctgggatagtcgactgtgttccggcaagcgaatggtaccgagtgacctggagcgaggttggcaatccctggtagacacctttagagtcatgtttcaactccgatgtttttccgtgcagaatttcgccggtcacatccaccttaccaccaaacgaggtgatcatacattgttggcccatgcacacaccaaatatcggaatctttccgctgaaatattggattgcggcgttactgattcctgcatcggtctcggggtggcccgggccaggactgataaccagctgagtaggcttctttgcagccaagtcctcaacagtgacttcgtcattgcggtatactgtgacggtagcaccttcaagaaccaggtactggtagacattccaggtaaatgagtcgtagttgtcaatcaaaatcacgttggatgcgctggccaatttggccgctttggtggcatggtggggggagtggtcaaccaggtccgccatgaccacggattgttgtaggagatccgggggaaaggattgggagaatttgggaatcggtattctgcaagctccggatctcagacacctaaaaccgaatcaaatgtttgcgaattatccagttggacggaagtgagtcaaaaagaatgtcccggcttacttgccactcaccgcccggcaataagatcagatagggcacctgattgttgacccagtcgcggtgaataatattcttttgaagctccgtctcaattcaagagcttcccacgctcgccacctacctttttctttgctctctcgtcacctttcctggtgtcgcctcgtttcgctcttcctttctaccctatgatgatctaattgcccaacatggctcccgtcccggaggcctatttcccgtccctggacaagtgcttctccggggacgttcaactcttgtatgtccactctcatcatttgtcgttatagaggctaatatgctgatacaatgtaggtcatggaaaagagcttttctctacgccattgatcccgaaagtcatgctaatgatggaggcaatatcgatgtcttcttctcacactccgaatccattcgcctactctctgatggcctaaaaccgcccccctccccctccgcaaaatccaagtcggaattcgaatccaaaaccgcagcaatccatgttgagaccaatggccaaagttctttcgacctgaaggagatcaaggcggacacgctatggttaagcaagcaagccggaatcgacgagatttctgctcttcgcatcgctatcttagaatggcagaaccgcccggcagcgcgtctcaccatcggtttttccagcgaggaagcgaccagtctacagagtgcggctgggaccgagaatcttcgaggctctctagccggtcccagcttcgccaacctattgaaccaaacagccagaagcgacggtggtcaatcatttgaaaaagaggagaagaggcgcttgcgactccgcgaggtgtatctctccgaggaaacccatgtcgtaaaaacactccgcaagctgcttgctctgtccctacacgatggtatctcagccgactcgaccgccagtcatgatcgcaaacttgctttgcagaaggtagggaccacaattttccaggacaagtcgactggtgatggattggaccggtttcttcaagaatgcatcagctcgatacgtcgtcggttaacgagtttggaaggagacggtggctggctcggtgccacagaaagcagtgaggaaatagagaacatatggagaacaagtctcgtggaggagattgttcatatcgtgcaaatcatgtttcaccagcttcaagcatcggtggaatttccaagtgcagacctcctattgtcctggctccagctcatggctgattatagcttcctggagacaattcaagcggtaagccgccagtcgcctattttgagctctcggaatgttaacgttttcttatagccttgtcagcaacccgtggaagtgttgttgccccttcaagctttcgtgtcacttaccacattggcgtttttaaaacccgctcgcgccatctctttccttcagaatgaggaatacatgcaatcctcgctccagccttacttctgctgtaaggataaaatctctcaaatcaatgagattttccttactgcatgcggtgatttgaacaccgtgaatccggcagccttttcatggggcctgatcttgtataccatccaagagctggcagaagacagaagaaccagccgagagcgtcaattgagccatgctttggctgccgcctacgacgagcagacacagaatgaagcactagctcaagcatctgtgtcttcagattatgaacaattgcttgactgcgctaggactccgcaaagcacggcggaagatgctattcccattcttacatctgatttcctgaaagaatcggcattcaacaccgttatcgccctggctagtaagaccgggtcaatgtcagccgtcgatgatggcctgacaacccgatggattcggttatcacttctcgaccttatccgagtcgctattatgttcttggattactctcccgaaattgtggggtcagtcctggctatcttaaatgatgatgacaacgggctgtcaagagactcaaattccctaggtcctgccagcgatcctaagtctgtattcgccaaggatcagaatttgatggatggcatctttcgcattgcacggtcccgtttcccttatgaaacgtcaccatttttactgctctgtcgtgctctcgtcagtgggcactctttgaatgaagaaggtttgccggctattcttgaggaggtggaaactatggaatcctttacacagattgtcccacccactttccagggctatgccaccattcgagaagacgagaacgccgattttgtttccctgctccaacccctcccaatgttagaaacatcgatccagaaccgtgctttcgagagggaaccaagcaatgctgtaatcgtcagcggttcttccgaaattccacggctgaccgttggtcaagtcatttccgattcaaaacccgcggttatcatgtgggagcatcgatactcctgcttaagctttctaggaagctggcttgaagaatggagcgagaccggtgggcactcgtctgagtggactgatgacactgctgcggaaattattgctctcttggccgacttgatagccaactctaaatcacaaagctctggcgatgcaagcggcaaaaggattctagagatggctagtgatgggctgtccaaacagggtgacatcatttctgtgatcttcgatatctttgaacgcaatttgcagactatcggctcccgaggagacttgggcaagtctttggacgtaaccatggcatgtctgcgctttatcaaggcacttataaagattttacccagtcgagtatggcctttccttggtcgcagcagtctcatcgggtccgatggcaagggaggcatcatgacagcaatcgtttcagcaatggaagttccttccggcgagtatccgttcctcctcagttgtgttgaccttgtgggcgctgtcatcgatgatgcggcatctcgagcagtattgcgaaagagcccgggcagcgtgacaagcaaaccatctatcgcatctgattggagtgctggtattccatctcacgtcatgagaactattatgttgaactttattcgcacaatgctggagattttcaacagctgtggaaattggaggttcaacctaccagaacaacggctcaagatcaactcgatgcttgctacttcgttcgagcgtgttctgtactatgccttcggaatcaatgacagcccgaaactagagaccaaagtgaccggcgttttctctacatctgcggcgtacattctggatatgctgcgccctcggtcaaccgccgacctgcccttcaacccaattcttcggttgatcgctgagggtcttcagactcccccaacacttcatctcagatatcttatcctctttgaagatcaggtcaactctacactgcggctctgcatcaaacttgtacaggcagcccaactggcagaacaacctgcctcgcttctggaggaacaactattcaaagccagcccggtcttagtcaaactctacgcgctacatgatgcatacagattgccggttgtgtcgcttctcgagattttgatctcaagcgccgcttcaaatccggataatgaaccaccttcccttgttggccaccttggggcagagtcgtcctgtctgttccttgatgtactgtcacaactcgacaagccgatgtgtgacagacctctatttcttgcagtatggcagctgctatcgacatttgttagcaagcgtcagcagtggcttgcagttttcattctcacagggtcatcccctcggcagactctgaagaaggaacccacttctagtgggcttagcatgaggagcgtgcctttcctgaaactggcgcttgagaaattgtctcatattgatcaacaagagccgcaagtagccttagcgttgctcgagtttgtctctcgtgcccaagaaaattggccatgggccacttcccacctgagcaagcacccccagttcttcaacagcataattaaccacgtctcaaaattgaagatctcttctctgccagtgatggaccaaatctatgccacgcggattgcagctgttgtcgcggacctgtgcgcggtctatctgcactcggcaaaggaaatgggagaccgaagctttataaagaccttgattccattagtttcgtggtatgccaaggatgcagttgaagtttcggcttacaattcttcattgcacgccaacttgaaaaagaactttgagatgcgatacgcgggctgcaaaattgtggacttcaaaaggacaccgctcgaagttcgtcatctgggacgggattactactacgacatgagtatgggagacaaactgctgtcctacgactttgcctgggctggcaccaagaaccgtgggtttgccgaggagtttgagcgtgccaacatcaatctgtctcttgtcgaggcgcaggtggtaggttttcttcccttcgttgcatatgagtttctttactaacctcaaaaagagccttctccatagctggaagttcttcgctatcgagcattgtgccgatttcatgcccgataccgaagtccgaaagtctatggcactggtcgcgcaaagttgtttgaaggccaatattagcagtggccctcccgaggccatctttgagcgaatccaacaagcacgcgttgactttgcccaggcacttctccagcggcttgtcgaggtacatgctagaggcgccgaagtcttccagctgctcgagattacctggaacgcactgcgatcccgccatctgacatatgaagacgctttgatcaatgatgataccgattacttccggtccctactgaacgtgttgttcctttcccttcagtttcaccttgatggcccctcccggagtgcccccgaagctatcaataagagggctgaggtttcttcgggtctgactgtcatcgtggaagtcgtgaaaacaatagtggcccagggcttcaaatccctcactacttatctccatgatgcgcccgagaaatgcacgccaaaagatttcgccattatcaatgctattctacagacatgcttgcaagtgaagaacgctgatcgtctctatgagcacatcgtgtaccacattgaggaatacgacaccgctcgtcatgcgacgacgctcttctcctgggccgaccaattggccgttgccggcgaccctgtgtacgccgagctcagcatctcgattctggtcaaaatgtcaaccctgcccatgctcgcagagcaccttgctgttgatgctgtcttgatgaaactgtccacctgccgtcttacaaacattctctgccaaaagaaagcattcggaccctttgatcctgttccccgactgtatgccatctggactggtggcttccttcctctgtgtctgaatatgctctacagtgtgatgcgggccgcgccggaggtggcagcattcctgaaccagtttgaatctcgcctgacccgcgcgacagaggcattctccagccatacggccgtttcctcggttccgacatccaagtggattagcctcaacatggtctcggaagcctactcgcttgcgctgatttcgttcatcctggaccggttccgcgaggcgggtgccagtgctggagttgacgcacaggccatccaagatctcaaatgggatagggtgcaggtcaaggaagatattgaggaactgctcggtcgccgcgctgctctgcgtgcacgcattgtcgcgaccaatgaaaaggagctggaatggtcccgacagaagcctgtcgacccgacttctgagtcacagaaccgattagaggagaagcttgttagtgagctgaaggcaacagtgacgtgtttgagtggggaggattcatgaatatgttctttgtagcctttctgctatttgtctcttctttttttccatgtattctgggttggcggggtgtagtaaatgaattatttcttgcatgaagctcaagtttcaaacaattgcattatcccaatccttcattcctttggattctatttttggagtggactatcacatgcaggacaggacgcctaatttggggaaaccaagttggcttgatcctaattggtctcttgcttgcagatcttggcagatgagctaacggggtcacatccctcctccccggttctcatgcacatgatattacccgaaggtatagccgactcgattcggccaagctgcttagcggtaacatcaatagggttgggtttgaatttggaggatagccgtggagaaggggaatattatcggcggtgcttgatttggcgaaccgatctatataggcctaaaagcatacgttagcttcgtgtgtggagacctagcagtcttgtagagtggatgtttttcggttgatgaatgcaagaatagccagcctcatgtggctgagagcggcatgatccagtttgcccaatgggagtctttctttggtagtcctttgcgttctattctttctaaatatccttgggtagatggcggaaagggcggcgtataacctttgatagccagcaactggcattttcaatagtgcaggctatattggtgtaggatgtttccatgtacttttctacactcgttccttccacttttgctgctgtggcgacagtaagttacaactcaactatggaggtaggtgtgaaggggtatagttggttaactagcggccagagtcaaatacctgacttttgccttatgttaatgggatttagaaagaaccgcatggtttctattcactatgagcttagtacactagtcccatgactgatctattactcggtacagcgtgaaaaccgaggctcgggctagtcaggttccccgcaaatcctatatgtatagcataaccgataatgcggggagattaactgcgaatcatgcaggatttaacgttctactccttatttataagaccccctcgccgttatctttctccccatatatcgatagcattagcattaccaaaatgccgtataaatcccgctggacgattgacatcccagacatccatttagcctctcttctccttaaatccccaacggcgcctctttccaagacacacaagtgctatctcgaagctgcccgtccagaaacccactatctcgccacctatgatctccgtctctggagccagcggttcgccgccggactacgcaaatcaggactccaacgaggagaccgcatcctcctcttctccggcaacgacctcttcttccccgtagtcttcctaggcgtgataatggccggaggaatcttcaccggcgcgaatccaagctacgtagcccgcgaactagcctaccaactccacgacagcggcgccacgtacctaatctgtgctagcagcagtctggaaacaggcatagaagctgccaaacaagccaatctcccccaaagccgcatcttcgcctatgacagctccatatacaacggtgtaacaaacccgcaaaagggctgcgcatactggagcgacctcctcgcctcggaagaagaaggccgcgctttcatatgggacgaacttaacacaccagctctgtcgtcccgcacactggcactcaactactccagcggcacaaccggccgccccaagggcgtcgagatctcgcacaagaactacgtcgccaatatgctccagtactgtcacacggcaagcctgcgtccggactaccaggcccgtcttgcgcgttcccgctggctatgcttcttgccgatgtaccacgcgatggcgcagaatatcttcatcgcggcggcgctgtaccgtgccacgccggtgtatatcatgtccaagtttgactttgtcaagatgttagagtatacgcagaaattcgggattacggatcttatcctcgtgccgccggttgttgttatgttagcgaaacatccggctgttaaagggtttgatttgagtagtgttgagttggttggaagtggtgctgcgccgttggggagggaggtttgtgaggaagttgagaggttgtggcctcccgggaagattaatattaaacaaggatggggaatgactgagtgagtttgttgttttgctagccgattcttagaaactaaactgatctgcttctgtatagggcgacttgctcggttacgggttggaacccttgcgagattagtacatcttcgtctgtcggtgagctcaatgccaattgtgaggcgaaaatcatgtcgcttgatggagccgaggtgaaagagcgaaactcgcgtggcgagttgtgggttcgcgctcccaatgtcatgaaaggctactggcgcaacgagaaggccactaaagagacgaagactgcggatggttggctccggacgggcgatattgcctttgtggatgacgatggcaaaattcatgttgtggatcgaatgaaggtgaggttttttgttttacaagaagaaagaagaaaaaaactaatacgaacaggaattaatcaaagtcaaaggcaaacaggtggcgcccgccgaattagaggctcttctacttgaacatccggcgatatcagacgtcgcggtgatcggtgttatcgtgtaagtctgactttttttatgggtctttttttttcttcgcttctgatcctgtttagcgagagcgatgagcgccctcgcgcatatgtggttcttaaaccgggccaatccgccacttcgaacgacatcgcgcatttcctggataacaaggtttccccgtttaagcggattaccggcggaatcgtatttctcgatgcgatacctaagaatccatcaggcaagattcttcgcatgaaactccgcgagcaggccaaggaggagctaaagagtgtcgctgcgagactctagactttgtttatattacaatttatatatcctagcggtttaccttttttccagggatgaatccaatgagtaggtataagagatgcctcggcacaatatatagagtatgtgcaccattctaatttcgtgtgtccttcggtgattggcagggtacaacagccgagccagtcaggccaacccctatatggacagtgcacactgtcagaagatggggccaaagggtgagggaaagtagatgaatgattgttcgcatgggttcgcgtagcccactaaaatagccgagtagggcatctcgcggtgtgattcgatgtatgaaatggcttagcgcgggggacccatgcaggcgccagctgaaagccaaagacaaaggcgatctccaagaggcgtatggcggagtactccgtacatccaactccgtacatttgtcatgatcgacatgtttctctccgcgggcattaataggtcaaatatccaaggtttcagggtcctaagaagaagataggcatattccttcgtcgtgaacagaaaaaaatgttaaaccggtggcgttaagaaggtaagctgagtggagacagggctggctgggccttatttatccacattttggggtatacttgtcagtcacgatgttgtacggcaaagagatcctgttcgttctgtgttgcaatttggattttgactttgcgacctgtcgactaattctgatttgccacgttaaaaatatcggcactcggtctcggttttcttccgtcagatgtatggcagagaaaccctatcttgcagatactatatcccggtatgcttcagtggtgatcaccttcgatcattcccccactatagtctaaattgggtctacaactccataatactcaaactctagctctttatatatcacctaaaaagcccacccctgcactccatcccactagttccttcccactcgcctccccgccaactccgcgcatagtctcgactcgacactggtatctttgactcgctaaaatcttccaaactctggccatctagatttactttcccacacgggcagttaagttgagctgtttccccattccacaggggaggcagtttcaacatattcttcgcgagtggtggacgctatccaaccacccaacaccccgtcatgaatgctgtggaacaaggatacaactacctatcttgtgacctcctacattcgaccacaaagtggtttctaccagtgaccagcctggtcagcttttcacttctcactctcatcctcctccaccgatatatcaaatatcgtcgtatgagacaagcacacataacctctacctctggattcaaagaaaagaatcaagacgtctggcttcaatctactgccatggaaaaaggaaacatcctctcaccgggctcgcacccatcggcatgcgatatcctgcaacctttatcccgtacaagcctcctgccaagcagtggagccctcgctgcacgggcccgagagcagcaaagtggaagtgctgcatcttcgatggcttcctcgcctgactgcgaggtgcaaaaacacattgaatcaactcagcaaatgtgcgacgaggatgccgggggtgtgcgcacttggaaacgtcttgtcgttgagtatcgatagttggccgcctgtttccggggtttattcattccgtacatttgtcggacttgagcggtcttcttttcgattgtatctcagccggggattccgtgggactgttatctttttttttttcttgctcttttgttatgccttctttcttggtttcccctccctatcgttgtctttactattttacgaataatgagaagcgtgggcttggtttgttttgggcggcaaatgggttcattttgttaagcatgtttagcaatacatatacatttgaatatgccacgtattgtggttatgatacattagaagaaggttgaaatctgataattagccgcccttgtagctcgaggaacatcttcagaatgcttggcttgattgtataattgaattgtacatgatcaactagttatcaatcatcgccttgttcgatgtgatgggtcgcggatctggaatgtatcagcgacaagagattcagatatggattgcgttgtaagacatactatatgagggttttcaagagcagattgatcgcatcaagatgcgattcgagcttctgtcggtatcggctcaaggactcacatctgagatgccacatgatgcgtcgccattgtgttttgacttgaacaatcaatcgtcgagagtgcaagaaattgaatccatttccatcaggtgatcctaccgaaggcgtggtcactgttgctcggtacttttctgtggcgctttcgagatgttctaaggtttggaggcacgatcgtaccattaaccctaattgttgagatagatcggtggcgccagggtccgcagtattagagtttctggacaagatatccatagcagctctttgcaactgactcagggagcaattcaaggcgaacagaacatccccaagttcttgtagatcgcgtggtgcattctcttgacctgaggttgcggctgtaagtaaccggcaggtaatttggctgcagagtacaatatctccaattgagaaaccgaacgacattccgccgtcgaatgtgggaaaagaaacaagaaaatgacaaatgagtggaattgagaacagtaatagggatcgaaaaagggttggtgtagtataggtaattcaagtatcagatagggtcctctgggcctcgttaatgcgtagccctatgtcgtagatattccgcattcctgcagatgacaaagtttcagagacaggggctggactgagccagtgcatgtgtctgccccatactgtgtaccaatcaggatcatagagatctgtgcagatgcctatatatatctcctctgattagcacctcttatgtcaacgaatgaaagcgaggggattcaatttgtccatatagaactttgtttagctgtagccaactagtctttttgtatctaaagcggtataaataatgtagttgaacccaagccgatccacaattctgatccggatgatcccgagtcatcttgaaagcgtccaagtcccccgcatatatgtgtagtaaaacgtccccatgacctgtaaggcacgtacctatgaaggtatttagctctgagactctggtggtacctggtggttattcgtcattcattgggcacgcacggctgggcatctattccaaagggttcagctacacggtcaagtcattacctcccaaaatctcccatacaatccgtctctctcgctcttcacagctctgctttctactaaattgcctgctcttgctctgtatgatggctatcccgatcgagattaagaaatccgcgacagccgacgaacttatcgagttcggcaagacccaggcataggtcgtttcgcccgtgtcccttcaatcactaaattagcacagctgaagcatgatgggtgcactatcttgagtgaacgaaggaatatgatcaacactatcgatgcgccggacaatgccatggctatcatcgtcgatatcagcgcgccaggcggcaaattcgttattggaaggcacgcaccgacgccgtggggcaacgacgtagtcgcggaaagagccacagagggcaagacgcacttggtaatctggccatggcagccggaatggcaattctatgcaatcggttcgaccaaaataagataccttgtaaagccctccaatgctacataacctagcataaaaggcccccgtcagcaagagaggtcctgtcagctgagattttgggtgatgagcccagtgaaagctctacaagatctgtcaatcgatcacttcatcgtcgcgtgatctaactcggccgtttgatattgcgaatagaacatgaaggaggcatatagtggagatattcggaggcgaccagtgcctcagacttgttagatgaatcgcttgtagctgtcaccacagaggcaatttcaccaaattgctagaatcgtcatcatctattggtctttaagtggggtgagccctcaaatcgaactgtgacgtttccttgacgcatgccgtcctgtgagaagcgaatggtagcgagcataaaatatatcaaattccaggtatccaaacagaggtcaaaatgtaggacctgccatagatggaagattcaagattcaaatctcagctgacacagccacgcagccacacaaggatcatccaatccttcaggcttctctcctctttcacgcatatgaacactcatcattatatgatcttccacaatgtacttcatccgtctcgctccaccgaccgcaagaaatcctttgattcgagccatatcgtcactcgcgcctgggagtattcttcaaggcacctattggaactaccgcattctcaaccacaaccacgttaagggggatagcacacatatctctgatgtcttcaaagccgaggtcattccacatgagaattatcataacacccccaaggctcccaaatggttcatttatcatataaagatataataactagacttaaaggctaacttggctgcatagggcttttgtcaaaggggctttacctgacaatgcaactgccatactgaatctggaacgcgaacgtcatgcttatcatcttcctggtgtctcttccagtcagtacttccggaagatgtacgacgtgatcgacgatagcactatcgccttagaatggctggataccactcttgcagagttgaaataccagcctaatgatatgggcactcattcatttgttgttgctgttctaagagcagcactgactagttgtgccgttctggaggactccaaatatgtgaatacaggtaaagtccctattcttgaccttggaacgttggaatagttagcatatactaactaccctagactataagcctgctaatattctgctttctggcatcggttctgactgtatcatcgccaaagtgggagacttggggctcagtaagcaaatactaatagacgaattacgatttcgctaatatcacacacttatagtggttccggttggccacctacgccacgcccagccatatgccatgcgagcccctgaagtctaccttggccaagcatgtgcagagccatcgcaggtcagggcagttgctgcgatgtttctttgctggatcaaaccgggtgtgttaggcatgtggggtagctatcatcctttcctgaacgaggcttggtctatagtaaagattaagcgactctttcccgagtgggacattccgacacctgatgaggtcgatgggcacttaattaaaacagtagtaaattgtgcccagtctatgactgaaaccgagccaaaactacaagaattcttaccttttgacgaggagacaaaaacgttggagatatcggaccagctgagagatcttcttcgtttcatgttggtacccgatccggttaaaatgccctccgcttcatctgtgctggcatcgagggagttgcaagcttttgagaatcttggcgcataatctaaccatgtggacttgtttggatagattacacccatagatgtatatactgtagtcaaattcaacccgatccacttgttaagttgttccccacctcgggagctgcgccaatgctgagtcatcacgaaagcgcgccagctctacggagtacatcgatgccacatcttcaacctacaacaacttacttttgtaattccaagccacagccatgaccgtaacgacattcccctctgagggatctccagatctcgcccttctcaatgttgctcgcctcttcaccagactcgagcataatctcctctctccgggaacagaccggcgggcattccaacaatcagaatatcagcgtatgcgcgtgaacaaggtaataaataactccatccttctagaactttgcctccaaagcttcactttcaagagacaagtataaatctaaccaatgccacagaacgtcgaatacgcccgcttactcctcacccaactcgagcgctccctcccacaaatcaaacccctcgaccgcaaacacgaagcacaagccgagatcgcgcgcgacagacagctcctgaaacgcatacagaccgtcctcgaggaagaagcagccaaagccgaagcgaagcaaggtgaagaagacgagactgacgacatcgacgacgaatggaaggagctattctccaagcccgtcaccgagaagaaaactgtctcgcgtaaagatcagcagataccgacaaggccatcagattcgcaacgagaagtgaacggagcgagccaaaccacgattacctcttccgcaacagcgactccagcaacaacaactccaacacccacaccctcatcaacaagcccaccagcacaagcatcagcaccagcacccccgaccctccgcaaccgctacacaactcaccccgcaccgccatcattcgaaaaagcagctacgactggaagggatacaaccaagctctctggaacagaatccgaactgagcacccacagactggaacaggaagatctgacaagctctctcctcgcgcttgcttcgcagctgaaagcctcctcgcataacttccaggcgacgctggaaggcgagaagtcggcgttggaccgcgcggtgtcgggcatcgaccgcacgagtaccacgatggaagcggcgggtaagaggatggggatgttgcgcaagatgacggagggcaaagggctgtgggggaggatgatgctgtatgcgtggattttcgggctatgggttgttgctattctgcttgtttatgttgggccgaagttgaggttttgaaactggcataattcagcgctgtcttcgtctctgtctatgacagtttgattctatctttatgcggataccctttttttttgctctgcatatatatctctgcaaataacactattgtcgatatctacttgggagactgatataacacgcatcgaggtatagaaatagtatggaattaagagtcagaaccttaagagtcaatccttgaactctgaaataacccaacgaccgactggcatgacacatgagaaggaaacattcaaatccgcggatcctggcatttccccgtgcccaatgcccggatggacgctcttggcttccaacggacgcgagaccaaggaaaatgatggggggagacgatatggttacatacataaacaagaactaggggagagatgatatgatatccagcattcaaatcagaaggatcacaaaaaaaaggtggaaaggaaataggaaagagaaaaagaagggaggggaatacttcttgttttctgtagtggatatcaggacaagagaaaacacaaaaaccggctagaggctgtgtagatggcagggaaaattagaacgtgagcaaatggagattaggaaaaggaaacgcaaaagagaatcaacgccgggatctcgaaacggggattttcgaccggttctgatcagccccggttaataaaaacatgcgatctaggttcgacatacttcaccaaacgatagttcattagatcaaaccgcatagacggagattctcttggatgatgatatctgtgaaacgttagacaagtgttgcgcactaggttgggatggctgagcttaccgttcactgctgccatgacgaatcgaatctgggtagtgtcagttgcgcaggtgaagtgcgtgtagatctgcttttgctcggcctggttcagggagacgaaacggttgaggatatagtcgcaagccgcggcgtagtcggcaccaccctcgtaatcagggaagtagttcttcatcgggctaacggggagcttttccttgaaacgatcgatcttgttgaggaacagaatgatcgaggtcttgacgaaccaccgggaattgcagatcgagtcgaacaaggtcagggcttcttgcatacggttgacggtctcgtcttcgaagagcagctggtcgtactcggagatggcgacgaggaacagaatggtggtgacgttctcgaagcagtgaatccacttcttgcgctcggatcgctgaccaccaacgtcgaacatgcggtatgtaaggtcaccgataatgaaagtggtctcggtgataccggtggtcttgacacgggaacggaggacatcctggtcggtggggaggtaatcgggctgggcaatgcgctcaatggaatcgaagtagctaaaggaaacgaattagccacgtcgcaatgcgacagacgagcggtcactactcactatttggcagagtcgttcagctggtattcgcgcgagcgcttgaagcactcctgaacaccagtgtcgcgccaaagttgtccaatggcgtttccaacctcggggggaatgctgtcaccctctatctgagcgggctgcatgaagatggtctgcacgtggtactcgtggcgcgcatcctccaggggcaactcgagggattccatggcctcgagaatgacgcgcatcgactggacggtattgctgtagatgatttccttgaatgattcacgctcgtcgcgagagtatccaccctcgtggatcagcttcatctgcttgagaatggtggacttgcccgactctccggctcctgtatacccagtcagccatctgtacatattcccatcggaactcaatggatcataccgagcaacagcatcttgatctcgtttctttgcatcatcttgtcgcgcttgagctggttctcaatctcctcattccgcgccttcccctccttatcttcggtgctcattccgcaacccattttgacggtatgaagtcgcaattaacggtgtgaaagtggatagagggttcttcgtggagggatattcgatggtttgttacagggactgtacaaggcgaatcactgtcagcaagctggaataatttcttccggaaatatcgcattgacgggctcgaggaggcgttgcataggtagcacaagcaccgctgagcagaggcagacggcgtttcagagttggtgtaagcgtgccgatgcaaggagtcgccaccgagtttccagagcaaatagccaattgacaggatcaaagggggaaaaaaaagggtacccacctgaaggttcttttgcgatttgcaaaaacgaaggacaaatcggcaacagggtataaaggaaagaaatgaaaagaaacgagccagaagaattcaaatagaatccaatctggaaaagaagaagagagagagaagagatacaagttgttcaaaggtaaggggcaagacggcaagactgaggggggaaattgggaaagtttcagcagagaaaggggatacgctggtaataccacggcagttaagcagcgcatgggtgactggggcggttatcggaggaaatagtatggtgttttccgtacacagattaccgattacaaaacaataccaccccggcaactgcagtgagctgattgggcggtgtggggacctgactggcccattcagccccttttgcttttttggctggtgatatcccacgggcattgcatcagagattctattttcagaggatgtcgatgtatatggatgcatctatggaacattctgtttcagacagtcagcccttcataccaatgctccataatagagcactgtacccgggtactttgtatatataaaaatgccggtggactcctggaggcgtgcagatcttgtggagagcaaaactagcatatcaaattacaatgctagcaacaacaggaaacttagaattctggctcgtcagggagtctggggagcgaacccctgaagaatactttatgtacatttagtagatcatacaatttgctccccacacggtgcataaaccccgaagtctgacctcatctcagttctcagtttcagtctgaggaaacaaagaaacaaagcaagactcctgcccaatcagactagtctgcgcctcatcccatgcatccatgtgcagttctttgatacttccttgaaacttctgaggtacaataatacggacaacccaataggtacaacatacatagtaccatgccgagatagactgtcataccttcaacattactgctcagcccctcgactgatgaatccaacaatcctacgtcagcatgattgaaaaggaggtgtcagtgagcccagggaaatccccgaatcggttcgatagtgaaactgaagggatttcctcgttccaatggcgccctaaggttgtctccttaagttctgcagacgacccactggtgcccctagccgttttcgccgctaatttgcgtgaggagtttcaaagttgatactagactccacttggcgcctcgtggcaatggagactattgaacttcgcggtttagcttggtgtctaaacatgacctaaactggcgaaatgccgaagtcacgggatgtgctgataatacactatattacttagatacagcctcatacaagaataaattacagatcaccctccatgcatgcatgttgtagatcagttccaatggctgcctgcttcatatcaggtgacgtacatttataatggaataaaaaacccagcgctactcacaacctcaattccttcaacccctttacaaagtctacctttcgaaggactccaaccaggacactcaagagtgtactttgactcatcttttctatattctccggacgctcgcgcagcatccaacttgctagtgcgtgacgatgggtgatgccctgcggccaaatgatgatgatttcagcgaagtcctccagcagagtctcaagatatggacttcctatctaggtactggtgacaaacagagccctatcccccgacaagccatagatatgagacctctcgtcagtcagaccccgtctttcctcggtgatggccttcctttgaacgagaatatctcgttcgcttgcgaagaaaacaaatcccatgatagactttacatcaacggcagatcaacgtggaggacttctcaagggacctgtgacctaccaccaaaggtttttccaaagcaatttctattagcagttgaccgtcgattaagtgtggaattatccagaagattctcctctttcagactggcatagagttcaagggctctcgggctatgatgagggaaactacctatctgttctttactttgcatgggcttacatcctatctgctcgatgggttgagttgcttaatcgctctgctgaccacgaatgtcacatgggctacattgcggatcgggtagagggtcgattgccacagccaaacaatcaatctctggttcaaattgacatcggccacgatgcttccgtggaagaagtccgctggtggcaggctattttgggctctgacgataggtgggacgcgaccgtgaagtataatggccacatctatttgtcgtatggtcgatttcggcaaagaaggtggaattcaacttggccactaaggatgttttgagcgcaatttcagaaccaccatcgtcggaaaccgctctcaactatctctcacgtttctgtgtgcaccatcgcctctacgcccagtgctcggtcgcccttgctggggtactcttcattccattcctggggaagggaacactctcacttcctcttccaaggcaagcttctcagtcggaactaacacatcgtattaatggctcgcctgtttctattccggatcttctagctgagcacaccgaattacttcctaggtatatgacgttgagctccagcccgcaggctttgcgttctattctatgcagcacctttttcaatccagatattgagtgcaatctcgtcagcgcctggctgaacccggctcttgcgattctcaattccatctcacctaatgagttgggccctttttttggcaaatcgaaagcctctactcggacctctctggcttggtgcaattctcacaggtctggcaaatattattttacgtgacgtacggacgggaatggtagctttcgatcttacagcatcggcctgggcaaatacagcaaatacattcttgacctctagaatggggactagtgatggtgaatcaatacgccgcgatgacgaatgccggctgtcattcattactgcctgcgaaggccatgaccgacctccaatctggccttggaagccttttgggagcacaccaatttgcgacacagatctgagcgtccgacagcattttcaatgtgctcattgcctagaatacgagtcttgggaatggatgttgacaaatgacgattcaattcgggattttagaaaggataacaacgaattccctgatcaaacaccacactccgcccccagtatgacaccggcagcactcagcgattataaatatgatttctcttcgcaaatgcactcggaaggagtaacccgtgggatatttggatggttgagacgaactggttatcctcttagcgaaaaacccatataccaacattcatgggtcgatttggaaagcagtgacgaagaagaagagcccgatgatgccaaatctgacgtggaaaagcaccggagcgcaaagaaaaagcacgttgacacatggcttgacggaatcgaatagcgcttatgaatcgggtgaggccgtgatatcattgtaccaaaagagcagtctggtccgctagctggatgatcgagacataaaaacacggtacatggccctgtattgccgtggtcagcggtttgactgatcttccaccttttcagactgccttgcacgtgtgactgttgtgcttatcattctaatgtccgcatcttaggtctctgtaaacagcccgaactggcggtcactatgatccttactcgcggacatgctctaatgccgaccaagagcctagtcgttctacaccactgcagaccaattgaaggggaaaagaaaaaaaaaaggccgaggatgatgattggacggcttaaccaccttgccccgctatgtactttccaaggcgagaatccaccgcttgcataatgcagtagatgggctcgaatacttagcccttgattgaagggattgacaattgacatgcaagaaatggaaaatggctcacggtttcagcaagacagattggcagagaagtccatatgctcaggtgtatgcatagtgactgactggatagactggatacaacctcgcacaagaataaattacctgcagttctagagccaatattacaaattgcgtagatcattccaaggatcgatctacacctatctaagccacaagacgtagatttatggctaatcggttgtaatatactcatacatatctacaacatacatattctcttctacataatatcccagctatataataaccacaatgtgaatcccatcggcgatcgttctaccgatcgaaaccaataaaccttggtacccaacgagagttcctcgatcgatgtggtttctcggtttctccactttaaaaaaggtacccttccccttccccaggctcccttcttatcaccacaatcatgtcgcacgaaatgtcccaattgggccctcggggtaatacgccaatccctcttgaaatgaacgacaagcactaacagtcccagccttcaaccacgcgagcagcagcgacgccgaggcggagtacgaccggctccgcgacctcgcgcgccaggaagcctccaagcgcggcgaatgtttcagtcgggtacgcaagcacccaatcccaattgcagttgtagttgtagtcattcgatcaccgctaacacccacccaccagtcgaaggaagcctactcgagcggcgatggcgccggcgccaagcaactctccgaggagggcaaggcccacggccgcaagatggaggagtacaacaaacaagcgtccgagttcatcttccgcgagaacaacgccaacgggcgcgtcgaggccgacaccatcgatctgcacggccagttcgctgaggaggccgaggagatcctggaagagcggatcaagtatgccaagtcgcatggacagacccatcttcatgtgtaagtgtcggaaacgagcccctaggaatttcttatcgtgtgcgctagacgcgacgcaacgtactgcgactaattccgcttcgcgatatagtatcgtcggcaaggggaaccactccgcgaaccatattcagaaaattaagccgcgcgtcgagcaggtgtgtcgggagctggggctgcagtataccaccgaggacaacgatggtcgcatctatgtcaacctgactggtggtgaggctgttatgcctccttcgactggttaccagggtggggctggatacccgggtcaacaacagggacaccagcaacaccagcagcagcagcatggacaaggacaccagcagcaacaacagcagcaacagccggacgaactcgaggagctggccaagaaattcgtgcccaggattctgcggaagctcgagaaggcttgctgtgtggttatgtgagcttgtggttcggtgtttgggacatatacatagatgcatagctgtgtttgtggacagatgtttgttgttttgcctgtgacattttgcgctgtcggtttctcgtttctagatcatctaccatctacataagtatacttcaagtctaggttcagccgacgactcatgatggcagggatgtgattatacccctacttcatatggacatggacattgccatttactttcatgctgttgaggacagctaattgaacaatttacactcccaaatccatatcataaatcatatcatcgtgaactctcatagctacatagcaaattgtgaaaacaagataactgaaacggggtatatccaacaaatacacgacttccacaaaatcatagtaaagaacaaagaaccaactagcgcgcattgggatccgacagcgtcgactccacgatcttttccacaatagcacgcaccatctgcccatcaccagctccgttgatcttcggcgtagcatcgatcgtctcaatcaacgccaatgcctgatctcgcaaatccccgacaacccgactggtgtgcgcaaagctgcccgtattcttcatatactgcaccgcatagcgcttgacctccacatccttggtattttgcttgaggatattaatcagctggcgattagacgggtccgagcgaatgctgtgaattatcgggaaggagaattttccctcggtgagatcctcgcagaaccctttattctccgtgtacacagtactcgaaaggttgaggtaatcatcgcagatctggaatatcagacccatgacattcaccaaggcaacgcagtctttccccgtcgtactctccgcctgcatcagtttcaccgcgagccgaaagagcccgcccgttttattgccgaccatttccaggtactcgtcttccgtcgggcaggtcagcgtgtcgcgccaaaacagatccatcccttggccccggtgcaggttcagcatctcttgtacgtagatgtcgattgcggccgggttgttgagctgctgaacttcttgcagcgcgaggaagtacacgtaatttgcggagttgattgtttgcgctgttccgaagatgttgtgcgcgacggggatgccgcggcggaggacggagttgtcttcgacgtcatcgattctggcgtcacgccgtcagcatcggatatggatcgggtgtgaagagggaggcggtgtggggtggactcacaatagtgatgatgtatgcagcatcgttacgaccttggtgatgatcgccaggctcgccggcgggacctgcagccaagcgttgaaggcgtggatcagttggcgccgaatatcttttcctgggtgttcgtgtacatagtcgtatggacccatgagaatcttgtcgttcttcgatgaccatgttccatccttgtacttggtaccgtcgacgctggacttgttgcgacgatgtccggtttttggaggctcttcgtctgtcaccgacagtttgtgtcggtgcgaggggctgtcggtgccatttgttgcattggtcgagctttcccgaggaggaacgggactcgatggttggaaggatgttgaattcatgattgcggatgggggatggaggggttcggtaggcggcagaaattagctagggacctccggggctagaagtttggttcatgtatagatgacatcaacacctctttttcatgtttgtatagctacatatgtagaatgatactatgataactatatcgtgaaacgtatcatgcaagatgtattctgcgtacatactttgtacctagtcgtagatggtatgatcggatgccgaggttgactaatcgggcggcggggctgagccacttgagccaacagtcaccagccaccttccaccagccacctgtcacctgccaccaaccaccagccaccgaatataaggttgacaaatgaaatacatcaatttgattggcaacgcagccctggataaactataatgatttgataggtcataagcagggacaacccaaatgtattcaataatccatagaaaatatcatgttcgctacagcaacggagcaagggaaacacggtgtgaacacggtgtgaatatacggtgtatacagtgtacacgatttaagcactccatacttactccatacttactccatactataattaaagtcgaatctgattgacgccaggggtggatctggaagaaagcgagttaagagtgtcccgatgcgtcgagttccctggtttattggcgcgttgccgggggcaacggcgctttatttactgcgaaccttggaaagccgcgaagggccccgactgacctcatccactcccaactgggacaacacgaaccttctccactttcttttttggatcttttgtttaagaatgttcctttgcttttcatttcggtagaatagctcacttttctatctcacatctgatttatcaatggaggctctattagcccattcgttcgattacctctcctcttatgagcctagcaagatccgtaaaggattacgccaggtcgaaggactcctcgcacagatatgtttatcaaaacctaagcccgtcttggaccggagatcgcgctcccccgatatccagcccgtcccaaagacgttgcccgagttgcgagacgatccggcctttcgggaattttccaaattgcaggaaagctttcaatggaatagtatgtctttgaaatttctatcgcaactagggcttgggtactaacaaaaatgcttcagtcgccatgcgcctagtatcctgtcttgaacaccttctcggccgagggagtaacgggacaaacgacatgctcattgtctgcacactggatttaatccaaggtgccctcctcctccaccgcggctcgcgctccctcttcgcccgcgaaatttacatgaacctcctccttgaccttctcgaccccatcaactgtccagcagtgcaatcagcaaccctactaacactcgtcaccgccctactggactgtccatcaaacacacgcacattcgagggcctcgatggcctcctcaccgtcacatcacttttcaaacaacgcgccacctcccgcgaagtcaagctcaagcttgtcgagttcctctacttttatctgatgcccgaggccttgacctcagcaccgatgtctccacaaggtctgcagcgcagccccagcaaacgcacctcagcgcgtagtccgcgctctgctgcggcagcagcgagtaaagtgagtcgtgatatacgtaccacggacgaaaagcagaatcttctagggaggtatctcaataacgtggaggacctcgtggaggatttgaaggagacggctccgttcggagcgacggtttactgaatgacctgactggcgatgattgactcactgcttgacgaccaatatgcgcgatgtccgctgcgatgacttggtgttcccttcctttttctctctctccatctcttttctctttactctttttccatcttcccttctccttatctttcgcccctcttcacgggcgtttacctcatgttccgtccggtacggcaattatgcgatcttctagactgatgcctcgtccccttttggcctgtcttttttgcctatttattcttcgcttcaatcctggaactttgtcgacctctactgtgcgctctcccggcttcgtttcctcgtcgtttcccttatgtctctttaatggcgacatgcatgtgtatgattattctccgtgattaagctgaactgtcaatatagtcctgatgaccaccaatatttcttcgtaattctacttctcaatgtaggcttcaacttgtaacctcggtttcgggctatctccggttatctttcctatctttctatctccattatagcctggatttatttcatataaatgagtcatcatatatgagtcaatgtagcacggactttaataaccaactatatagttatatacttcaagttcgacgttcgaagtggatcaagtccagtattaccgtggatcgcaagttcgatatatccccgctaacccaccgagatcgagaatcgttccacggtacaccttagccttcaaaatggagacaatccaggagttgctagcggcaaagccgtgcggaaacccaaagcagacgcagtacgtcgacacggtcgaagcatacgataaatgggcagaggtgtgtatatatatcctctttgccataatatatatacagcattcatataaccatttaaactgtatccactatctatcaaaataccaaaactaatacaaaacaggtctacgacacagacggcaacttcctccaacgcctcgacacaatcgagatgcgctccctactaccccaattcatcgaccgggtaagcaagcgcttccagccaacagataccgagaccgaaacaacccgccctagcctagtagatctaggctgcggcaccggccgcaacacaatccagctcctgaccgcgcttagcacagccaataaagccacctccttctcggtaatcggactggatgcctcgcgcgggatgctagacgtagcgcggacggcgacaggccagtatgcggcggaaaatgcagcacagacgcacgttgagcttgggatccttgaccttcttcagcctgaggtatcgaggacacagcttccggcttcgttgtatgcacccggtgctgtgggggtcatatctacgctggtgctggagcatattccgcttgggcggttttttgcggctgcggcggggattatgaggtccggggcgtatttgcttgtgacgaatatgcatgcggagatggggatgcggagtcaggccgggtttacggatgagaggggggtgaaggtccggcctacgagttattgtcatgctattcctgatgttttggatgcagctagggaggctgggtttgaggttgtggaggttgttggagcgggtgcggatggggtggttgttaggggggttgatgatcaattgacggatgctctgggggcgagggcgaagaagtgggttggggtgagggtttggtttggggtttgttttgttaagacgggatgagatggaaagtagatcaacggagatatcattttatctagataatgacttcgaatccaacgccatgagttgctgttatacacttagaagaatttcagtagtctgtcgcggtgttgtacaaggttgggatgctctttgagcagttgtgctagccggttccgtttccagcctagggtatcatccaagatcagctgcgtgtaggcaaagacgctggcatcaaagaggcccgggtttggccggccgaagaagtgctcatccttgccgagcaaggtggatagcgcctcaaatgcgccacccgcatcgccttccagggcagcggcgtcgatgtagcgcgatgtcttgaggagctcatcgcgggcggcctgttgtagctggtggcctagggctgcgcgcacgatcgagtttgaggttgttggatttacgtagagtcggcgtgcgacggcgttgaagttctcactgtctaggtaaagcatgtataactagacacgtcgttagctccgagtctagggttcgtttcatatggaattatcggcctacccaagcgctgcgtatccggttgtccaaaagcgaggcataaacctcgaaccgcaggttcaattgctgttcctcctcgcagtggacttgttcaatggcccatttttggatcttgtgtgaagggatcgggtttgaggcgtccgcaggcagcgaggggaggaggaaaggtagggagccattcggcgacgcatgattgttggacgaggtgatctcaaagtcaattccaacgaatttcaagtatgcctagtgcgagaccgatcagtgtggttccgacagggacagctacacgcacccttgcatgcgagtatagacggcacgaacctgccatttgagacattgaggattgaatgaaggccggccatgttgtacaccagatgcgtcggcgaaaacgtatagctggttgatattctcgtgtcgcggtcgaaggcgttgaggaatctcgttggccggataggtaatcaacgggaacttgtcgaagaggcgcctgataggagcagggactgtaaagaatggactggcattggactcttctggagggctatcggggcctttgggcggcattgtggtggtctgaaatccaaagtcgccaaagtccaagtccgaaagtccaaaagtgtccaagtgccgtcatcgaaacaattccgacgcgccaaacccgaacaggaaggtattgccttacctaatgatggccaggtaccgtcctccccgcaccttttctgacttttttttcgtttgtacttgggaaaagccggaacttacgatctataacctattcggatcatatagattcgatatcctagtgcttattctattactcgtggtgttggtgcgatcacatcagccccggtctctcccgcttcaccgttgaagaaaccaaacctccacttcgctccgtctagactccaccttttattctgatctgctcacgcgaacaactttgacaataccggcatacatatggcttagttcgtcaccaaatacgaggcgtctgacggtcctagcggaaacgggcgattgtatgcgcggggtatcgactagcggttggggttctgcgacacacggttgcgacattacgaatcaatcttgcgtctcaccttaattcgacggaatcatacatattccttcgccaacatgcctctcgacgaagaaggtgccaagtggtcctggtaggaatatctcgtacattgtcaatgaaaccgggctaaaccgttactccagtgaaccatgcattcgaggtcaccgatcgtcaaaatgccagcacttcgatagactcatgatgaaggtccctaaagctggccgacctcttgcaaaatgcccccacccgaagggaacctgcagctgccagaagtcatatgccgtgatggtccgcattccgaaaggtaaggatatatttgtcaacccactacacatgtgtttgcgtcgtactgacttgcctaggctcatcatgtctatgtcgtccgctatataaagttcctatggataccaacgagtcaacccagtctcccccaccatccatggtttccacttcgtcacctgcgccgggcaaggtccagaagtctggaagaagacaaagtactatgcaagcagcacctgaaaacatagctcgggcgttacaaaatatgccagacaaggttaagctcgaggatggaacatcgaacttgacttcagacttctcttcacaggtcgggttagatggtgcacacatatcttctactacacaaaaccgaagtacgccaacgcccacagaaacttccaggcaagactcgcagtctccccaagtatcaagctgctgctctcaaaaacaaaagccaaaggcaccaaccccgaccccagctcctactgcggctgctgctcctgctcagaatggtggatcttgctgtggagggtctcgccctcctacgacaaatcaagctgtctacccagaggccgaccaatcgcaatttcagccgcctattgcttgggacgatcagagttatatgcaattcccaatgcctcaaatgtcgccctggcagaattcctcgatacccacgcacgaagactacatgcattccgccatgcatcaagtacatccccaacacccaagcctccataatgggtacatgggaatggtgctgccacactctcagccccaaattccccagatagggatgtcactcggtgtgactgcaccgccgtccatggcgtactccaacgagatgaacggtcttggaattacgcaagcctctatgagtccatacatgctcaacaacctcgagccttcctacaacgccccaccaggcggcgactcttgtcatgactgtagctgtggagaagattgtcagtgtcttggctgcgctgctcatccattcaataccacaacacgaaaacatgtccaagagatgggtgccatgatcacctccaacggagatgacaagaacccagaagtcatcaacccttaccaaacctcaccttaccagggaggcaccccttcgacctcgttcccttacttcattcaaagcaccccttcaatggaccatggcttccagccgattccatttgatagctactcagacccaaactctaccttagccagcggttactcctcccctctatccgcaaaccaccatctaaaccagcagttaatgcatccttcggagtattacaccctggaatacccagtcggcctaccaagcgcctgttctgacatgacggggagctgccaatgcggtagcgactgtagctgtgtcggctgtctcacacacagcggccacaacggtctttccctggatatccctatccccgagcaccccattcccgacacagaggacaagcaaactcaacactcgcgccatgtttcccgcacaagttccgctacgtctcgatcttcgcggatcccgatattagacaatgtgtctgtgccctgccttagtccgcgcactttggagacttctaggatctagatgatctacgtcttgatgattattaccattttctttctctactcattttttcccctgcgccgtttttgatcttacatgatttatgatctctcatgataccctatctagaatctctgctctagacggccacaataatagattgactgtttgaatgtttgttgagtagaattcataccactatttctgctattgtcttttttcttgccttctgtaatgttttttttttcatccgtagaaccagacagggcatgtattggcgtataaactagagacaccccgctaccccgggaccacttttccttaccctaataagccctacagactgggacatagtatattttgctaatatcttctaatatcctatttgaaaacaatatgatgagcatcaatgcattgggggatatcataattcttaagcaaaaggtaatatacagattaaagacagttactcacaaaaccccagtcaacccttattccactttccgaacttcacatagtcatcatagagcgacttgaacactgcacggccagagacatccaacgcagcgttaagcgcacgcatagactcacgcgacatgacatccagagccgcataaagaccaggcaagatagcggccttgacatctggagacagcgacccacgcagcgagcactgcgcatactccataacaacatactgcaagtactggccggcaatacgcttcgccttcttcgtctgatcagtcagggcctcgcgggatgcgccaggctggggacggaggacggccgagacggtagggtcgcacagcgaggtcaacagacgggtgtaataggtagcgtgcgaagcgtcgagcggggcgagccagaagggctgtgagagggtgggctggaagcgggagcggccgcgtttgcgggaccgcgcgaagagacagcctagtaggcgctgcatggcgtttactactaggtggaagcggccgccgatcttgaggcgttgcaggctgagtacgacgcccattagtcggcacaggcgggtgtagatggttggtgcgtaggctggggagatcttggggccgattttggaggaggcgctggcgattgcgctgagaatgctgtcgatgttgcattgggtgagactgcgggtgtggctgcggagaaggaggtccaggcattccgatgcgaagcagaattggtcgatgcttgtgctttggatgatggtttcggcgagggatgtgcagaggagggagatctcgcgtgatgtggcgctctctttgtcttcgacgggagagagcgaggaaacggcgaggtagagcacgagtagtctgtagctggcgttttcgccaatcaagccaagtccgcgaacttcgcagatcgtctgggtgattttttctacgggcattgagcggaagcgttcagtggtggtccggataaagagttgctggtcctcggcatagagagactgaagagcaagcgtctcggcgcattgtaagactggctgagcgatgttctcttcgggtcccttgcaggcaagaagacgtcgtcggatcaaccgagagggttccgagtcaacggtcaattccatgtaattgtcgatcttggaaagaaacttctccacttcgacgttgttggtggctagatcttcgaaatcctctagagcatcgatggtcttgataatagtaattgtttcctccaacttctgcttcctgcactggtctttgacatgtttcatgtcagccaacacaaagtcaaacactttttggcgacaagcggcaagttccttctccgagaaggctgtctgcagctgctcgcgatgaacccagagctctgacaaggtcaacctcagaaggtaacaggccatggaatcacgatccacctgctccattttagctgtttgcttcgatgcccgggcgaagagcttcttgaacatcttgttccggtcattctcagatgaaaccaggagctttgccgatatcgcgtggtgcaggcttcggaatgctttcatgatctggaggtcgaggtcggtaccctctaatggtacggctcgagcagcagtccagatgggctcccagtcactggtcagtgtggcatcacacttaggcatggcagccaatttcgccatcatcgtaattattccaattgtgacttccggagaactgtcctgttcaagtagaacattttgcaacttattcaagatggtggttctcagtccccgggtgatcaacggggctggaaccctctgcaagctcttgacaagcagtttacgattgagcggatcttgctcgatgctctcgttgagaagaagggaaagatcagagacaatgaagggagcgttgagcatgtattcatgacagaccacactcgcccatgcctgaaggaaccttgcttcttccgaaacagcctccaagggaaacgacgacgaatggtattgagcagctgccagggacaggatatgacggaatagacgggatcgatcctcagaagatataagagcccagacttctggaactctgacaagggctaggaaataagctagaccaagggttgtttgggaattcacagtctctgtgcggccattccatggcgccttcatcgacttcttggcatccttggttgagatggaggtgatgaggtctatgacatccttggtggctttgacgaatgagcctagctgctcatccctggcgtgtgccttggttgcagcaatcaggaaccggtaagcctcccacgattccagaggagcgagttgagctttggttaggtccttgtggttgcggtgcacagtcttagcggcgacttctaccaacggcataattgtacctgccatggtattatcggctgactgcagggtgttctccaggaaattccgaaccaaccgccacagacgccatcgccagtgcagagcctgcttcgacgacagagtagagcttatggtttctaggagagattctaatgtcttttccgattccgggaacgtcgagactcggccacggaaacttgcctcgacaagaacaaacttagcataagactgaggggtgtcagcgactttgccattttcagctcgcgtctcgctagcagcggtgcgcatctgggcagcaacatgcgtctcagtgagcgaagtccgcatcagctccgagtaagcatccgccaactcatcatcttcccaaaccgagaataaactcagattgctgttatcttggcgagcctcatccacaataaggatttgattgtgccacaattccatgaagctgggcaggtctcttgcggcagcgaaacctcgtaacaacggcagcacaaccttgctcttgattatgtcgtagtccctccgtttccgggaaccactctcgcgccattgtaacaggaccttgtcgagcaatgcgtcaagaagcttacgcgaatcacgtaaaccggagtttggcaggaaaatatcaaccccaagactgataaacagagccgtcacattccactggaccttctcaagaccttgttcgaaaagacctgtgtaattggcatgcgccagaatggtgtgaagagaaagaccgacctttcggtcgagagcgacctggaggaggtgctccaataccgagatgaacttggaagagaaggtagcgaagtcttcctcctttgctgtagaaaacgctagctctgcaacagcgacgaataaagtctccaaccacggcgcttcatgtgtctgcctccggaacacatctctaggaacagcacgcacggcgttgtcaaaaagctcaggaagaagttccactgatcgccaaggatgcatacaagcttcattggttgctttgttttccttggctacggcaaactcgcgaatgatcggcctgaaagtatcagttactggtttgaccgagctccagtcgggctcatcttgagaataatcgattccagagcctccacgctcaaagaatgctgcacgagcgggaagtaagacatgcagggcaataatgcgttcaaccgcatgtagcagattggctcgctcgtcggtgtcgagtttggcggaccgcaggcaaatctggagcctgagcgcgtgggcgaagcaatgtctcgcgaagaattcattactggacttgttgtccatatcatcttcacggtaagaccttgattcccacagctccaccaccgagggaaacacgtatagcaagtgctgaagatcggttgttttcccctcatgcgagaactgcttggcggccacggcggctacccggaatgctcgacccagcagcatggcgacggcctcgggctcgcctctcagcgcaagcttcaaatgagagtttgccacgccatcagtgcctagtgtgcgctgtgcaagtgtcacaaatccgtggagacaatccaaggcgcggatgaaggcaaggaagcatgctgcggggttctgacgctgctcgtccacgtccacgtccatggcgtctgcatcattctcagttgtcattctcttgcgttttttcccttggcttcctcggcgatcatcgcgtgtcggggatgcagacagtgtgtgactagactcggagtcagagctaagggttgctcccagaccagaaaatatatcggcctccaaatcttcgagtgtatcgcatagaatcgataaaaatttctgatctctaagaatagcagcgatattcttcggcgaaatcaggttgatgagctgtcgtaatagaaggaacgaagccgcgtccactctatagtttttcccacttctcaacctctttaatagccatcgcagaacccattcctccttcggggtagcgtttgtttgaattcgaacatctcgatgaacttccgggtgactttcacatagtgtcaaatccacaccgatgatctgtgccgcttcgtgaatctgagtcgttggactggcggtgcccttctcaaggcggaggagcgcctcttgcgatgagcgcggacgctgtgggtgcgcaacacattagatcccggagaaagacgtgtatcattcgaaggtcacatttgacttacctccgcaatcaacggcatctcgaaaaaagcaaattattcgagagagtgggtatttatttgtcgaggaagagaaaaaaaaacgaagaccaaaaagaaaaaccgcatattgctccgaccgcctttggccgagtcgactcggtccgctaaacctcccaaactccttgcactccacacgcctccattcacctctataattccacataattgcaactggttcgtgttttaccctcggaattcactccggctcaattgatgcttatttctgcaccgatagatttatcgcaatggctgaatccagtgaatccgggccgatcgcgcgagccaccaagcccgtcagcgaagctttgcttaacgagaaggtatgagctagctgggatcttcaaatggggaagttgcaatatagaatcataccattgatatatatgacaattgtctcggtctggaaggaaacatgggagaacccgttggctaaccttttaacgtcatataattagtgggaccgcgccatctcctctgtgatcatcaagtcctccctcggtctgtctttcggtgttgtcttctcggtgctgctcttcaagcggaaggcttggcccgcgtggattggtctcggcttcggtgccggacgtgcttgggaagaggctgatggtacgttcatctctctaattcattcggttcacgggcatttagaggggcatttagtgaagttggagcttcgggtcactataagataagcacacttgagcttgggcagaggctgtatgctgtaattttttcagcatcgagcttcgtaggcccttcaacagtgacccgactatccgcttttctccgagcctacctatctccaagatctaagaatgactgagctaacttgtacttagcctccttccgccgtggtgactcccctatcagagatgccctccgccgttaaagaatagctgtcaagtgtgtatgatacattgtacagaaggcaagaggccatcaatgaatggttgcttcttggcccagagaagaattggtataccggttcaacatcaacaccgaacgaggtgtttcctagatttttcccccgtcttttgaattcagaaaaatgattgaattgaaaacatctcctggcacttcacttccatagcatagagaagacgtacttttatcggtctcatttggcctttttggtctaccagaacgaggcttcgacaagccagaatgccattcgtgcgctttgttgattatagcagattgtagaaagagaaatccatggatatctctggtgaattcgcctgtaaccccattggacatacggagtatgttgtagatgaattccattagcgccaaaaaatctttagaacccgtgggcacacaagatataaacacattaccaaatactgtcatctactggaggacaaccatggcaatatgacaccgttcatgaaaaagaaactgaggttcaagatgccaggcagaggttcccggtaattaacatcacgtgtgtggacgtctagatagtttatcattggaccgctggaatatagttatactattgcccctatattaacttgcttgccccgaggattttgttcaagctacaacaatgactgcgtgtctaagatgatgctttgaccggagtaaagcacacttttcgtggaagctcgtttgaagcggaatacacttttcgtacctgcgttcaaatcgttatcaaaggataatctatctctattcttgcccgaacaaacaagataggatggatcccttcagccgactcccttggtttgctctgcaaaatgtcctgtccgctctgccagatctaccgtcgctccacagactacacaacacatccacggaagtcgcaaccttcctgcaccaaaacaatgacctattcgcccggattgtggatgccataatcgaaaacacggcccacgaaagaagcctgttcccggttgtgcagcgtgatgtacggcaactggtgatcatctgggctgagcagtcaagaaggcggcaacagcagccaactgaacagaacgaacagcaagaaacagccggaaacccgagtgtcctcgacaacctgcgataccttgcgagacatggtttcggccgcctaacaccgaatttagggagcatatcaccgtcgacgccagcagctgttctgtgtcggctgctcgcgctaatgtcccggttgcgctgcctcgtgcatgcgtcattccacgcactggttgcgaagtccctccagctccggatcgagcacttaccgaagaaaagtttatatatcaatacacgcaggcttgggcccagccatcgtccgcaggggatcccttatacgccggttgatgttggtccaatgatgtgggttgaagagcagcgcctgctcgagagctttttctgtattgccatcttctacgaactgcgcaagatgtatgcgaatttctccgtggtctcgatgcgatcagaaaccttccagatttcgtcgcacgatacggtcgaggacttttggaagaaagtctttcagggcgagaagggtggccagctggagcagatcgccacgactctttcctggttagatggtcaggccggacgacgtgaaaacgtgtactcatggctggcctccggaccggtttcaacggaatacctttcttactacccatgttatacaccgttgaatgatgagcaatgggaggacgaaaagacctatatacatgactatcattcctcgcatggtgcaatgtctttgagtgcagctcgatgttctttaacttcgccgctgcgatgcgtggattatgcggcctttcgcccgtacggtctgatcttctggagtgccactcggatggacgctttgggatttcggctggtgtttgggattggccaccatatgtggtttgcactgtcctttgtcctcacggataaggattgggaagacctagtcgcacggcagctggatcggagcttcaacccgatcacaatgtaaattttgagataatcaatccggaaccttggtttgctcaattcaattgctaacttgaatctactattctacatgggtcggcaattatgaacttatttaccctgccactgcttgtctggcgtctagataggagaaacaatactggggaattgacccgaggtaaagaagccttacatggttctttccgttgttcgatccggccttcatatcatgcgccattttcgcgcatcagaactcgttcgaattgaatcgctctgtcgccagcttcttgtaggctgttcttgggcggcgccgagggcgcaggcgtacttgcctattatggtggtgatgcttagagcagatacctacttatgttaccttcttaaagaaggaacctacacgcttatcagttgcaccagcttctagttgaaacaaaagcagagactggacagcctccgaacttttaagaatgatagacacacatacatcacacaatgtcaataaataggagtgataggtgtactctttatacttcctctaggcaaataagtttatcctttaagtagagatagctcgtaaaaatggtagtgagcctattttggggacagaaataactcctttccaggcccgcggctttactacatagccagggcccctaacagctagagctcctggcaaagattgatttttttgaaaagtgtatttaataccctcggaaataactgattactccgagccattgaccggtatattatcaacctaggtcacagaacaagagaaagtagcgaatgaaaaaatgaagtaaattgagcaaaaaaaaaaagagagagaaagttcaaggtagctcgcagtttattcggcttttccttttccttttccaggcggaggacgcaaattctcttcaacggcccgaactggaacttcaagacgcctgggcatcagggaagggccaagagtgacacctatgaagtccaaatgggtcaccatggtccaaagcgcccaagcttcccatgacatccccataacaaggaaaatggattcatcagtctcgtacgcgtccgaaatctccactttcatattgggcggtagatcttggatcgctttttggaagccttgtaggacgtcgctatgacctgatatgtggctgtgaccatgcaaagtcagtttgacaagtacatgtttctcatttgcatgcgaggaaaggtgaggaatgcgcgaggggatagtgtagttcttgaacacaagtctgatcggctgagtaccgctaatagtttccatcacagcatttggagcatggggcggtttctgtctttgaatttcttgaaataaggcggctgtggtcacacttgattggcctttgaagtgctgaactgcacggaatagtcgcatagtaaatgacactgtctgagctcgaggatttgttccctcattggcaccacaggccgccagcatttggatcgttcttgtctgctgcgctcttgtcgcagcaccagagtaacaacaatcaagtaccccgagtacatcgacgtatttcatagcatccggttcgtcccaaaagtttgcacgaatgcgggaccatggcatagacctcttgccggagacaaaagacagacgcccgtcagatatcattccatgcccgacgtagtagaatacgaataaggaatgccgtttggaacgatgacagtcatacatgacttcgcggatcttgccttgaagattccaacttggtatcgtatctgatgatttcacaatgtactcggtatactggatgccgaaggtttccatcactttgcccatagtggtgatgtctttgtctgcgccagtattgtcatcttcccatcgtacaaggattgccactttcagatcgtggacattgccacgagctgctgataccttttttaggtctgctttcagggctgggaggtggtgaaccagaggtgttctcgaagggaatgatgtcgtagtggatgagaatgaaaccggggcagaatggtgagacgtggtgggcgataccggatcagacggctcggccattgtgctaagcgatgttagtccagagtacggattggttcacgcttagtactcacgttgtgaaaggtgggaaagaattgatgctgagtgtgacagtctgagcgacgacggtggagaaaagagggaaaggacaagtttcaagtaggataaactgaagcgttagcaggtgtaaagaagagagttgaaaagtcttgtaaagtatgtagataggtgtagatgtgtgaagagaggaagacagagactcaaggcgactgctgtttatatagtcggccttgaaccatagattagacgcccgtgtcccaaaagtgaagtgaaccacctttctatacctatttagagaatcacttgatttatcaaagtaaagcagtttaaattagcaagaatagcagtcttgttagctgttctcttagatgtctttatcaactatatatacaaaacacgcgtctacttaaagagacttcagttttatctaatttatttctattattcctcggggttttcatctgatatttcataggtcaatacttgcatgcattaagagtgtatgagctcttagcgagagtgtgattatgaatacttaattgttcagagatatcgaggttcctagatcttattattagtagaatgaatgaatgtctgactcataaaccccggagaagatccatctctagaagccaaggaactaggaagcagtcaaatattatcatgtcatcgtaaatttattcgcagatagggaattaattatataaattcaagcgcgctcgacagcaacagcagcagtgaaaacaaatatcaaaagaagatgccgtccataaacaaaaactcaagtccgctctcaaagcttcctgtccgaagtattcggacctttccgatcatccaacccaagcgcatcatcaaacgacctccgctcagcataaccatgagcctccatgtcattggggtcctttccgtatgaaacggagagatcctcagcatcgatgtcaacctcgttccaggtagcacttgtctcagggacggggaagaaccacgtcagagcgaagtacacgccaccggaaacaatggacccggtgaaatagttgatgttgtagatgtattccgcgccgatgggaacctcgcgccccacggcaccggcgaagccaacgatattaatcaggataccgcaaatgtatgcggtataggcacgccaggagaagccgccgttgtaatagtagcagtctgttttgctcgcgctgtagagagatttgacgttcaagaagcccttgcggacgatgtagtagtcgcagatcatgacgccggcgatggcggagaggaagagggaatatgctgagaggtaggttgtgaagttgtttgaggtcgagagcaggttccactgtggattttgttagttttggtcatgtcatatgtggggattgaataaacaagtggaagaacgtactggacacatagcgaggccgacaatggcgcagatgtaactacctcgtcggatgctcatgtatcggggtagcagtgcagtcagatcagtacctgccgagatcgagttggcggaaatgtttgttccgagctgagctagagcaaatccggtggcgatgacgaagataccgaagcgctggccggaactggctccatcaaggaactttgcgaggagatcaaggggattccatgtgtagccgtcgttgaagatcaccgatgaggaggaagacacgatgattccaatgaatgaggtgacgccaaagccgaccggaatagtaaatagctgggcccaaattgcatcctttggtgttttcgcaaatcgtgagaaatcggggttgttcatgataagtgccgcgaagtttccgatgcacgacatgattcctttcaccatcgcccatgaaagatcgcttccgtggacggtgttagacttgtggataatcgggccgagaccgtgagcacgggaaatggcccaggcaaagaaagagatggcagcgatgggagagtagatcgccttagcggtgaataggtgacggactttgtgaacggggaaccacaaggctggaagcgagaccagccagaacaagaagaagctgaggaagttcttggtgtcgacgccagcactggcagagagaccattgtgaaggttccggtagctgggccagatggcctcgatcatgacagtcacacactgacctagtaatgtataagtacgcgtgttttcaccggattggaaagatacatacctccgatataactctgcacgccataccaaatgatagccatcaccacgcggttaaggacgggccataaagaaccccatattccgaatgaagctcgagctgtgacgggaaaagaaatgtgatagacagcgccaattcgtccagtcaggcacacgaagcctgcagccacgaaatatccaacccagacacagatccaggactgccaccaggaaagaccgtcgacaatcatcgaggaggaaatcatccatgtgttctatatcttgtgttagatgccaccaggcttcaaccgggcaccattttgagatactgacaatattaagcgagtctgcaatccagaaagcaacaaaattgatccatctccattgacgtcgttcagggtccactgtattgtttccataaattagttttgcattctttgtggaccacgatgaagggaggatctgagatcctagaatggtgagtctcacctggtcgtagatcactgttggtcaacatcatctgggcattggtgagtccctgctcgtgctctacggccagcttgtcgagtatccatttgaactggcccatgttggcgggtggacgtgtagtcttggacgtataggcttgttgctaatagttgccagtagagtgacgtagtcgaccgaccaaatgaagtgataatgcaaatgtatcgcggaggagttgaacaaaagacgaagcttgaagcagggattataatggggacatcagtgtcactttatacaattacccacgtggaatgactctggggcgaccctgtctccatcgtgaatcctcgtttccccgagtgagataagaaattcgttgtctgagtgtctctagttttggaagcatcgacgatgatcggagccagtatgggcctatcatggccgcttacggacagtgaacgaatgagttcaagtaagacttcccgacgttatctgcaaggatttgccggaaaattcgcaaccttgcaatgttgggtccacttgtctccatatcaaaaatggtatcagagacggtgattggtggaccctaatctatacattgatatggagaaaacctggagatagaaagatcttggcgttgactcgatgagatcgagtaataagataggtcacgtgtataatgcctcaggccagattccacgcctcaggccaggtatcacgtaagcgtctcacttgggatgtcagtgcgaaaaaaaaaaaagaaatatacaacatatgtaccagatacgcttacttatattactatatctcatgtgaggcgaaagaaagtaaagataaataatatgttcgcatacatactacagtatatggagataaacagaagtggcatgcgagtgtgcaatagtgtataattgaattcacagatcaactgtgaaacgagcctcctgaaaaaaaatcccaagtccctatgcaatgatgataaacaatatgatgaaagagaagatttgctccagtgaaccagtcacgtgtatactctccgatgtggccgactccctcaaatgcgatgatgatgatgatgatgatgatgatgatgatgatgaataacacagaaccgagttcccgaaaaatcctatgtggacacataagaaataagataaaaatgaaacacatacatgaggcgaaacaaataagaaaagatgggacgaacgagaatacaaacaaacacatctcccagtcggatacatggccggatgatcagtttctggatttgtcgcagacaaataacaggacaaggacaatgaacaagataatacccatggtaaatggcaaaaataaaactcgaagcaacttggggggtatcgctgtgacgggtatggatggcaatggtgtgataaacccgacaatgtaggcaggcacagatgaaagcaaagagtgggatatgatagaatagacaaacgccggaaccttggttgatgctgacatggataggaatacaattccagatcgggagagggatgggaggaaagaccagcacaaaaatgcagtggtcgtggtaggagtgggcgaggaaagataagatgtgactctcattgcacgaatgatgagttcgacgttgttgacacagtgggtgtcaggttaggagagctttccttgtcctcggggcttggagaatcactgcgatcatgggcttgatccctttcgcgctcggccgatgaggagcgcttgaagacggtctggccgatttggcgtagaaggcccatgcgctcagcgcggagctcttctaggtccagacgctgaacggagatgggatcttgcttggagatcttgcagaaaagggtcgagaacaagtactggtcgccgctggcatcgtagaggggcaagtagcgataaccttgcgagagactggtgagcttggcagtaaaagtcgccagctgcacactgttgttattgcctgcactgcggccgtccattgagctccagacagtccatcgcacaaagacaagatcgggatatttagtttccagcgagagcttgaacttgtcattgaaaacggggctgtagccattgctttgctcgatcttggtgcggcggcgatgtggatatccgataccggacatgccgttgcgcccggaagcatccataccgccttcgccgaggacgaagctttgaccacgatcatcagcactgaacatctcaatctcaacgtaagggttgatgctgtcgtcctgtccgatggtgcgtggacgggggagttgttgtgcggaaacaacgtcaactgagaatcgaaccagtttgcgctccatcttgcgcttctgatttccatcaacagccgggaggcgaaggctctcaggcttgaggatgtagccggtacgatcagtcccagcggcgaacatagcctggttcatttgcatgccgatgtcgtaagtttgccagttgagtgctaccatttgcacaccgcggcgccagaacttgttcggatcaaaattagatgaacgaagtcggaatccggaaggatacactcgcgtaaggtacttgcggttgtgtgcttctagtgcaactttgttgtcgtgactctgacagacactctcgaaggaccgctcagcaaacgagtatatatggttgtaccgtctgctctctggagacgagaagctgcgccatttgtagccgcgggtgtagacacccaagtcagaaagaggcttggtaatcttgcttttctggcgccgctttttctttttgtcagtgtgaacagacactagagctccgtcactgtcttcagttgcactgctcatgctcgtggcagtaagcgagcgcctatcctgcaagatcaaagggccaacgctgtcgacgggacccattgtaggaggactcgagagcgagggaagagctagcgtgctcgtctcattgagcgtcggtcgcacaaacggcgtactaacactgcgtttgcggccgtgggtgccgacggtgccggtattttggcggggatcaaactcattctcgtcacaggtcttgactttgaccagaacacgacccttgagctcttccggtgaagggaggatatagcagttggtcatcaagggctcgaggataagacgttccttgaatgtctccttcatgatcttgaccattgccagttgctgttccggattgcagtgcacctcaagagaaagaataagtgggaagtcgcatgtgataaaagcataccggttgatgacggtgatgcaatccgcaaagaggacactggtggtgagagtccgcccgtgagacactatggggcgtccatctgcaccatcccagcaatcgatctcgacacaacgacacccttgctgaagcgcgctaacgtaagcctcggtgcttgatgcaccagccacttggcggcccaggagataagtgttgtgagagctcgagatgaagtattcgttcaacggtcggtcgaatctcgactggggagcacgtgaagcgtagacaccgttgctggacgaggacaaaaatgcggcaaatgcatccaggttcatccgcgacacaggtggaggaaggtcggatccttctgcagaaggagtgcgagatttagaggccctccgaacgtacttgtcgaacagtgcagaccagtagatcctgtcggattcgatgtcttcattttgcacatcacgaaggaaagtcaagaactcttccagagtcatgccttctttcgattttgcggtatgaagcttgaagatatctttgacatcctttcgttccttcagacgcaaaaggaaatccttgaattcagaaaaatccaacctgccgttacaggcagcgtcagctttagtgaattgtgcccgaagcatgttcttggaacagttgatatgcaagctgcggcagaccttctccacggcagcgaggtcgagactttgctcctctactagagggaggccctgcgggaaaagtctcgacatctcgcgctgccagtgtgcctgcagaaccgcttcgctttggctcgaaccagccagaccagacatgagatcgattctgtaccgagagatatgctcaagagtggtgatccacaggtcaagaatacggtcgcttggagcgataagatgcaaggttttaaccgctcggcccttggagcgatcagaatccgcaatgacaatggtgaaccatcggcgctccaaatcttcggggatctgatgttcttcccggtaattgcgagcatcggcaccaacccggatttctttgatatcatcgatatagaagcgtttggctggattagagacatcccaaaaaaccttggcggcatctaagtcaaggaaaaagcggacttgctttctgtgtttcttggttaccttggtgaggactgtgcctcgctgcacagcagagtctaccttgggcgcaacggcaacggcgggaacgggaccagcctcgcgagccctattaatacgactcnnnnnnnnnnnnnnnnnnnnnnnnnnnnnnnnnnnnnnnnnnnnnnnnnnnnnnnnnnnnnnnnnnnnnnnnnnnnnnnnnnnnnnnagggggggagcgggcccacccgggggagccatattaatacgactctcgctgcgaagactggatgcctctgagccagcccatgcacccaggttgtccaaggtttcaccggtttcatcctcgttgcttgaatcaagggcgctgtctcggacaggttgggaaccggttttgctatcactgcgccggcgcatgataatgggaccagtgctccggtcccgcttctcgttttgggtggtagactgcctcctgcgagtcaatttgttggcggcgcctctcgagattcgtctcatgagacccggcgccttggacggagctgggtcattaaagctggaagggtttgcgtttccaggaacggccatgatagattcgccgaggtcgagggggcctggcgtaggcagggaagaaccgttcactcggccaaagaggggggtgccagcaggggttaaactatagggtgtgccgtgaccagggatggatgaggtaggagtacaggtcggagaagaggtgaaagctcgtgtggaagggggaggacgagatgtgacaacatggcggagagaagtcggttgagggagagatgtcgcaagctttaagttggattgggtgtcagcatccagagtcggcgaggtagtcgtagcataagccatgacgaatatcaaaacgacagctcagctgtcgatagaggaatccaagcctgtcgtataaagtgccaacgtccgagtcacctggactcagaaatggacgaataggtaacagcgtatgggaccggcctgctgtcaaggttcgcaaattttatgcgatcagagccaaaagagtattctgacacggcaaaaaatgatcgttcagccacgtcctcagcagaagttcaccgttcctgaactctgctgcatcttgggctggattaggtgtagtgcggagagccctgccggagagcagctcacggggggaaataaatcgcaacaaaagaagatatgagcgattaaaaaagtccctgataacaattgcaaagggcactggccctgtgcaacggccaatctcccacgagtgatattctcagccgatgctaaccactggggatagaacgtcacaaacgaaatcaaccagggaatggtttccagcctcgaggaagtggaacgtgagtactcgtcttgcttcttttggagcccggccgattctctgtatgtccttccaatgataccaatgctacccctctcttatgcgtgtcgatctgccggtgcgtgggggaagctgctgctctgcagtggaagcggggagtgctgtggtatggaccaattgatcgtggaatcaccgagtgaattgggcaaggcagcgcagaaccggttcgaaattgaagggcgtgcgccaaagcgagtcaaaggccgaatgtgatgcgtatgcaggtatccttgccagagttcagacaagagccccaagaaccggctttgggtgcttgcggaggtggacaggcggcagcaataaaaaagacccaagagtcaagggttctcctagtccgacagggttcgtggcgcaattggctgagatcggagactagcgatgcggcaggcgagggagtacccgtgctagagtgcagggagtctttttccccggcgcaacgaagctaggataggagaatgcgacgaaaatcggcacttgcgacgaagttgccaacgcagtggatgcaggcggtcgaaagaggaaaggagcaatccgagactgggccgagttagggagcttgctgatgctggattatttagtgccgttcgaggatcactgcaagctgaatgcgagtcgaggagtggataaatttgcggaagatcatgcgacgagagggagaagacctgcgttgtccttatcgtcgtatgagtatagagtttttccttctggtttcaaggaggggaggtaattgaagaagagttggggttgaagggggaaaaagcgaaaataattaaatccatgaatcccaaatccgcaaattgaagctgcggtgggtactgggtacttacgatagacgtagccggcggtatgcgaaatcgtgtaccggatacgtgtattgtccggtaaggataaaatactggtattctgtaacaatccgaagtatgtcgtaatttggatattcgacctctttcttcgttcttctttttctttttctgtgggagagtcaataaatattcaaggacatcggattcaagcggtaactgctgatattccagttgtgatggggataggaggaaaaatgtgtgtatggtctgattagggcaaatgtccaagactcacccagtgtagagatgaaccaatcagtaggaatgaggctgatatctcaaaagaaaaaaaaaagaaaagtaacaaagaattctctagagtgagaaggaggaaaaggagagggcctttgaattgattaaatactacaaccaggtgcaattgctcatccccttcaggcatgcccctacagttaggtactactttaatacccaagtgcctatcaaaatacagagctgcctaccatgagatgacgatgtggaatgattgctaggcggaaacccgttgcttggtgccattggacgatccttggaattcctgaggaatgctatcggccaaactgagccgatctgtgtttcaaatgtgttgccctgaagcgacgggaattacaatttccctacaatcaacctatgacagattctcctggatcttttgtgtgaaaaaggggattccccctttctcttcttcagaactcgtctttcataatcataaatgttccgtgacattatggattatagtggatacaagaatcactagcagtttatttctttcagatttatagtccgaggcaccgccgggctctatttcccccacattgcagcccagttagtcgactagtcgacttttaatataatcactttgaggtttttactctgtatctgttagaccataacaggcattctttacctgtattacttccgaggaaatttccgcttaataccgatagagcggtccggggaagatatgcggagccttcggattgctgcgttttgatctcgagattcaattagactttcctgttctccctgtgatacacggtcttatctagtgttgttgtttccttcaaggttgtgtttgtgttcattgttgactggtcaggccctatctgcacctaagccctgacacaaaaaaagagtgaagtcgatcacgacacatatcaccattttctcctattcaataccttggtgggggttaaaggtacggagtacaaggtatctacatcgccgaaacgtcgaaattaaatctcatccctgaaccggtgaggcttggtgtggcagtgaaaaaaccgtttaggcggtgcagaacgagtggattatccaacgtaaaaacagatcgtcggggagtttgaggtctctgtttttgtcatgaacactacctactccgtgtacgaggcccgcacttcccgcagcgtgattccatgctttcgtattttcagccccccttttttataccttagtctcagatcctccagcttggcttatacctgtcttgtcaagacacacacagttacacagactatacgatgcagagtgtgaccagccgcaatgcataggaacatctgcggggttcaccagcaaccccgcagccgttggaacttggtgagctggcgatgccgtgcttcaccctttccttgattttgcttcacaactctgtgccgctacagccggagaaaagaaaatcgaaatccctcagcacccctccataaaggctactcatgctactctgatcctgggctcctgcacgtcacccgggtgggctgttatggactttagcgttatccaaggacgataaccaacagcccccgacaaggatttggttcagaccttagggatatttcccctatggtaataagataatcgagtatctaggagccccgcgtacgctcacaacgtattcggaacgggcctctccttgtggattttatacgccgcaagatcggaaaaggcgacgggaaggtaaaattacctaaaaggggaaatagtcgtcactttttagttttctttttgctcgtgttgaatttcctttgtttttttttgtgggctgggaatacggtgctggaatgaaatgactcatatgccccagtatacacgcaacttcaaaactacatttttgagccgaatctattgctgaccgtgtctcctgtccaatatctgtgcgctatcgacgtgacatcgtgcagggcggttatggcgggttaaaagaataccctcggttccctgcgacagcacaacagcgaaatagattaaaacttgcagggagatcaaacccagttctgttattattggattatagaaagtagaccgccacgttgtctaagagaccattgcaaaagaccgaagagtcctgtctttgatccatattccattgtgcctcgtcagccctaatatagctaccccacctagtaatgaggtaaaaacaaagagcggtggctgaagcaaggatctgcgcgttcgttacagccactttttccgatgacagcgatgtgataatttctgtcggtcaaaacatcctgaccgctaatcacggtgctttagatgatccataatcaaagttgctagccagtcagcgatctccaccagaatccgactagggggttacagacgggatgaagaggggttgtttagcgaactccatttgcctacattatacatggactcgtgcatatgcacattattgtgaagaaccgtgctatcaggccatgcttgcacgaatgattcccagctctgacgtgagacatgcgacttatactaggctaatagcatgatggaggtgattcagattcagattacatatttttgtgtttcggtaactaggacttggtatgtacataggaaaacatgtcttactatttttgcttccaagatccttggggtcttccattggcttatggaatttgatgtccacttgacagggtcgttctcgtatagagtacaagctagtgtattttatatatgacatcgctcaggggaacgttctgtttctcaatacttccaatggttccttctggaaggtcaaaaatactggtacagtcaatatagtagtaacggtaatcgaacatagagtccacgtcattcttcttcatcttgacggagatacctatctacccgtggacttcttatatcgtcgagactcgagagtaatctgcaagatttgaatggcgtcatactgcctacagaggtattcagcctcctgcactccattttgatgtgcatgtaaacaatacataccagtcaatcttgcatccgctccttgctacgatcaacagccctaaataatgtccccccacttttgacggcgggctctccctatgggacgaaaccttcggcgaaaaaactctcttatgctctttgttccctttgtgattctgtggggagtgcttcgattgccgggattatttttgtaagatcgattggattaataggagaaataaaaaaacttatttctttcatatcaacactaatcttctcgtaaattccagaatatctatttaattggacgacctatactatttcaactcccaatcgttaattagttagtaaccttggaatgattgtggtgacatcatgaagacgcaacgagaaccaaatttctttcgttacggtattacgtgttttgatacgcgtacagtacgtaaaaagtcaggtacatcgaatgttccttgggaccttccgagtttggaaatcccagtatcacattacaacatacaacatacggagtatagcgcaagcttgtcgggatctgagaagctcggccttccaggggcactcgttttttcttgcttaaagaggcaaataaaaggaaaatttgagtactgagctatgggtctgatcttcaggagaacggaaggggctgaacatctccatttccatttctggagaatttaatatatattctccctttctgagtgccattactactatgatataactgtaacatttcaaatgtttagtttgggaaaccgcaatatatattccatctctgtactgtaacactcattcaaaatagagttacctagcacgatttagactactttcaagtattccaataacaatcttacatgctaacattgaattatacagacccagcggaatggaaccgttgcgcctcactggggtccttgctccatcaccttaagcctcgcgtacactttcttccccggttatatcatgcaagctgtgattgacttactcgaaacagccattcttcctctcgagatacctatcaggcatacaaacacccccgggaatacagccccggcgacgggctactcggccggatgtacatcttctttgggttataccaaacttggaagccagtcaaaagaagcaccccgctttgacgcatgcacgtcgacaggcctctaccttcgaaaatgacagtgcatgccagatactatccactagcttacccaaagaagaaagccatcacaggaactgacacgtctcagacatcccccactctcgtccctttcagcccagcctcgtcccgctcctccactccttcgatccgtgttcgatgcttccagtgatatatgcaaatcaagcgaggctgtgttgtacaacataggatcacgtataaccccacactaatacggaaatggaaaaaaataaacatgcaaaggaggccatttcaccatcctcgggcctctctctctttgatacgacaccccgggctacctctcgttggctcagaatcatcgcccccaatcaccgacccggctgttgctagatgctggagattgtctacccctcctggggcatttcgattccgactgcaggaaggcagatgtgtgtctctttccttttttttttttacctttttccgccttcctgccgtgcatgtgactcaacttggaatgaatgttcccatcatatccgaggatattggtgcaacagtatcatagggcgcccgtggttcgcacgtcactgattgtgtaaccataatcatgcattgcgactcgtcccggtcctattcgaaatgatatccttgtttcagaggaaactatcccggaaccggcatggtgccatcactcgtctcacggctgatctgttcgactttcttacgttgtacctttacgacggtgcctttttttttcattgccggtgcggattccggattcaactccatcccatgtctgtatgaggcacggcttacggatttcgtgcacggtgtcgggcgttttgaatgctcgtttcataggcggcgtgcgatcatacgattagggagatcgcatacgtggccatgagtcggataccaagggaagtacacatatgtttcttgaagcttgcaatacttcacgcgacgtatcgtatacctcagacaaagcgggagagcgggagagcgggaaaggaaacatcaagagattgcaacaacccataagcacggagtactccgtagaatccgggacaatgtctcacagtccactcatctttgattacccgtcgtgttggatatcgtggctgaatatctatcgccgacagatattgcggacccatatctcggaatgacacccggctccaagcggctccggctcttagaaaaacaactccccactatactaacctgatctcagtctcgcgattggtgcaagtcgattatggcttggatagcagagacctctgggcagcaggctgacgccattctgaagcagtggtatcagccccagtggggcaagcaagaccaggaaaatatcaccggaaacgccgtcgagccaatgtgccagcttccaaagccagcttagctgctgttagctcaacaaatccgacatcccgcagctacctcaatctaatttatccgaagcactcatttcctctaccagttctaccacacatccccacacatccatccaccaagcaaattcgcattttaccatataccaaacatccgggacacaaagcattcgccagacgtctagcggtttatacatgtcacagatctgagccttcccatatcccagaacctgaaatcttgaaacggaccccacactcagctcctgtgggacaacgtggcttccagaattttcatcgaaggttgtccagcccaccccgggaaatttagtaaaggatcagggtcaaaccccgacatgtcaggatctaattaagatgacttcgaacacgagctgttccttcccttcgccatctttgaggtctattactgacagaatcatgccacgggtcgctcgggagccaatgccagcgaatttggtccgcaggtcttggcggtttgacattgaacctctagcgctacccgggacgacgacggtggctggcggataggcgtatcgaaacctgttgcagctgtgggtcctttgcgggttctgttgctgtcgcaacgagtagtattatgtcccgtaatatggaattcgtacgggatccctccgtgtacagagtacagtatagggctatagttggtatttggcggtttcttgtgggttttaaatgctgtcgtctattctggggagcagctcggggtagtgtcgaatgaatgtattgcttgcattcagcctcctcttaattttggcgcatgagctacaaagaagtacatacctgtgaaccatggggtcggtcaggtgactttgggtcgacctcttactagaacgaatcattatcttcccccaagctttcagtgctcacgaaatgagtcattccactttagttagctagttaactagttacctaagactcaagagtaagacccgacggtgacagtacctaataaattacaacatgatacatcgctaaattatctgcttgcttcaaagtatgcattgaaatcctttgtaatgcatactgtgggcgacgtcaatcaagtttcataagttacaatataacagatccctggaaggaacgatggagcgttcttgcccgtattggagggaaacgctccttccaatgggtcaagaaacaagtgacgtggagaaggaaggatgttcacggaggacttcctggagtatatacgaccacgatagcgagtagtagcgctatataaagtagtttctcgggcagttccctcgtagaaagcgcacgatggtagataaaccagtattaactcaggcacttgcagttaggtcataaccccccctgcccctaatactcctgatgtacagctgctctatctccgactgggacggtgaaagccgctgaatatttagatgtttatctaggaattgaaatgtcttctgtactgacaacccaatagctccaatcttagcctggagccctccttcttctggggatcgaccaatccacatctctcgtcggttatccccgagatgctcgagggcgttgaacacgcggagggtctcctcgggctcgaggtacagcgactgcgtagcgccggatacgagcacgggacattttacatcatctaggcgactcgaaccgtccggtcggcgaagagtaaatttcatcatctcaaccaaggtatccgtcggtgtcttcaccccgaagaaccagatggccaatccaatttcccaccgggcctggaacgaactggccatggccatggccatcatgctgttgatcagctgcgtggggatccagccattgttccagccgtcgaggagcatcggagagatatggttgcggacgaaatcccacatgtcgtagaagggatcaatagagacgcaggcatggatgcgggggtctgccgccgcgcgtaacgcatagtatccgcccatggaagcgccggccactgccacgtgggagagatttagttccagctcgggatactcttcgacaaaccgctcgaggaagtccaacacccggccgacgaccaattcccagtcgggacgcatggcggtcttatcccgtcggagcatgatcccctgcccaggcccttcgaatgtgagcaccgcgtagcctagattcggcccactggccgcatagacatagtagagctcctcttggatggagtccgccccgcccagactgatcaacagtggtaccgactccttcagtcgcttcgacgcgggcgggagataaaggtatccgggtaggggatacggttcgaaggggatgctgaccgcaaacgccgggccgttgcctaatggaagcgcctgcgcaaatgtttcgatcaccttgagggctagagggagtacccgaagatccggcgtatttggcgcatcgtggaacatgtacccgcttgcgcggtagtagttggatgcgcgcaggaatgcccgccgtgccgaaaccctgtccccggtgcgcatggcctcatcgcccagggcccgggctttgtttgcctgtgctagccacgcgcgatgccagctttcggggttgtcgttggcgatatcactggccgccacgaggcattccccgatctcggcgccgccatagggggcggcggagagaatccggataaactcgaagttgaagaaatcggatttaaaaaagcgatgcatttcgactgagagcagggaggattgagcgaaactatcgtccgtctatgttatgtatggtgttgaacttggggacaaaatcgcatgtccgatggtcgaccgactccgaatccgacggaggccagcagcaagccaggcacaggctctatatgagtacatattcgtttttgttcccgtttcttctccgagtgactatacaattaaccactatccccttgatcaagaaacaagcagcaccaaaatgggcgttgaactcgttgcagccgacagtctggccctgaagatcctccgagtgactcccttgatcgccacgacaattctgtaagtgagccaactcagcttcgttttgataaagaggattacccttaacactccaattctttagattggtcaaccgactggcacaatactttgcgctctcctcgtttctccctccttatacctccaccaaaaaggttgaccatgttggcgctgccctacaacactggctccaaacggtggtccctcgaatttggactggagtcatcggtatcgtcttgattgcgcgggtggctcttatcctcaatttgtttgtgcacaccgaagacttagctggcacgtatgcgcgattgctctacggcattggcctgttcttctcgtttgcgcacttattcattgcccccacgatgttaaagtttgagacgcgcatgatgagtccagatacgattccggaagtgacattggagctgttggccgggtggctcaagatcaataacgtgcggatttgggtggtggacgtgccgttctgggtggttggagtccttgctacgttggagtcatgcaagatgtagagaatatcaatttagggggggcgtaggaaactggatgtagaggagaagggaacggggtgaagggtttagggaatggacggttgccaattggttgagtgcgcggttcgcgatagagagaacagagtgagaataaacataagcggtcatgtgatataaaagtacacctgaggcagagatcacaacgcagacaccaccttctcttagtgactttttccatttcatacatatcctgcagccatcatgctcctcccattgtcgacaccgttccaaatatgatcctccttgccttgcgctcgatgaactgggcgaaatttcaaaaaaggccccttcttcgcccctgtaacatggtcctgtaatgtgtactcctggcagtactccattccctcggcgggttcaagatcaaaccgccaaatgatgttggaaagagtcaagagaatctccaccagggcgaggccttttccaatacagctccgcgtgccaagagaaaacggcatgaaggcctctcgaaccccaggaggtccgtcttccagccagcgatctggctggaagcaaaacgggtccggatagatcgttgggttgtggtgaatgctgtagactccaacggcaacgtcataccccgccggaatgtgacagccatcgatcatcgacccgccttcctcaacctcgcgccagagagcactccccgcaggaggcgacagccggagagcctcatcgatgcaggcgcgcaggtattgacatgagttcaactgtgtccccgcgtggatctcctccgcagacgcaaaacagctgcggacttcccgggttactcgctcgtacacggagggctctctggtgatatagaaaagtgttgctgccagagtagtggcggtggtatcggaacctgcgtggaaaagaattattcctcgctacgacacgcgttatttttattatgttttctctctcaacacttaccagcgacaatcaacgtagcagcctcgcctccaagttcgtcaatccgcaatgtcttcgcggtgacagtatctttggctgatttgagatatgaaaagacatcccgctcctttagcagggaacttttcttgaccctctctgagaccgtccgtctgatgaacttgataaagcgatttctccaaagaatcgaccgggagaacagcctcttatcgagccggaaaagggtgaggatgggagcctgcagaataacactcactcgaacattcgattcttcaatagcgttaatgatggggcggaacttttcctgccggatggtgtcataactagcgctgaagaccagggccgacatgatgtcgaaggtgaggtagtcgactttgtgatcaatcagcatgggcaattcattttaggcaggttgacaggactatacaccactttgccatgtcctggcctttactccattttccatcgttgctattaagatcgccctggagaataccgcagagcctttgtaccagctcgaggacacgaggctcaaaggaccgaatggctgcgtccgagaagccttgactcatgatccgccttctctgcgcatgtttctttttgtctcggagcgtgagggtgttgggcgcttgatggaccagcgtttcatacactttggacttgcggacccggctcccaatgccgtagatatctatccagcctcagtgacagtttcgcggcgtgacattcgccttgctcaggtaggtacttacccattaccgcttgggctgtattaaatgtcagtcgatccggtgcgtagcggatatgattccctgtgaaagaatcagtttatcttttgacacggacggatttatgaggccctaattgttaccgtatttctgatggcaccgccagatgtccatgtggatgtcacccttccacgcatggtaagccgcatagagattggtgaccctgcccaacagcggtccgggatatctagccaaggggtgaaaggtgagtcgataaagtactagtccaacaatctgatttggtattgtcagtaaagactagataactagaccacgctgaatgtgacatacacagaccagacccccgactactagtagtcccagggttgtcccggcagtgagcacgagttgccaccctacagtattcattagcacaatcacgggaataatcatggtaacgattgaacagagaactgatttacactgcggccgaattgctgcgaaggcttgactatctcttgccttggtggctaactaatagacccgagtccgagtccgactatccgaatggcttccgggactatttacgactaaaatgcagcatatatacatctgaaaaggccccgattcatactggacgcaatctaaagaaaatttagtaacaaaatggtgaccgaatccgagtttcctccgccaccagccaatcttggtacgccgaagacgtgcccgccattctttgcgacttgattctgacattgctagattggaacaacattggcatacagattcgcgagggtaagacacaaccctgtgagatcaagaccacagtgtagacatatcttaacgtactacattacagtcaacggacatgtccaatgtcgatataacgttcaaacgggatgctggagcgagcctgaggtggtcaagggaactgatctgactgtcagcggactgtctcctgcgttaaattatggtaagaattcttctcgagcgagccaaacattgtgaccttccgcgttgactgtggagaataggaatgcaagcctacgaaggcatgaaaggtcagtgcaaatcatacacccgccgccaagttaaactctataacgttatctctaatgctccaatgcagccttccgctatccgaatggacatattcatgtgttcagactcccggatcacagcgctcgtctgcgccattcgtgcgagtttgtctcgattcctcctctgccaacggatcaattttcccgttgcgtgtcgttggctgtgtccatcaatgccgagttcgttcctccgcatgataccagtgcggcactctatatccgacccctagtcttcggctctggaccgcagattaacctcatcttaccagacgagtataccttttgcgtctttgttttgcccgtcacgggcctcctgggagccagggcggtggacgcgctggttttggaagagtttgaccgcacagccccgatgggaacgggatcggccaaggtagggggcaactatgctcccgtcctgaggtggtcgatgcaggcgaagtcacaaggctatggaatcactctgcatctggatagcaaaacccgatccgaaattgacgagttctctgccgcagggtttatcggcgtcaaacagatgggcgaggatgtcacattagtcaccccggatagtccgaatatcatccgaagcatcaccagcgagagctgccttcagctggcacgttcatttggatggaaggttgagctccgacccgtgaaatacgaagagttgtccgaattttcggagatcttggctgtcggtacagcggccgtggtggtgcccattagttcaataacgagaacggctcgtggggagaagtttgtgtatacacctacggtagaagggagctaccagtgtgccacaaagttgtccaaggcaatccaggatatccagagaggtctcgcagaggacgtattctcgtggtgttaccctattatgaggccagaaacctaccattcaagcaaagagatcgatatataggtgcacagcataacatagatggatataggggattgttacgaggaccccccccccccccccccccccctccaccccccctttggggattcaacttaccagccctccacatcccttaacgtcgaagacctacaatttgtatataaaccactaacaaaatcaagtcatttttatgacatcaagtacttcatcgtcaacaattacttcaataactgctccaaaaactgcttcaacaacttcaacaaccgctctatcatcaccaagggatcaaaacatgtaggtatgagatagaacacacgttttttctaatcaaaatgtatttttgactatacaaagtagaattcaaaagtgtagatttaagaattaagtctggcagaattgaattaatgccttctgtgtaaggaagaatcaggcagaagggaggtccttgtaacaatcccctagatgtaaaccaacgtctagcactgtcatcatttcctcctaggctggtcaaaactacgtacaaaacatccaaacagatactgacactatttacacattcagccataggtgaaaacgggaatcgctgtcggagccgtactcacgtccgaccccgatgcttctcccgaatccgaagagggcgaacatgactacacctacaccccttccacatattacaacaaatagaaaatgagctctgcgtggatcataccgtcggcagttaaaacaggaggtttacttgtagctcgaaaatatatctcgtgttattttttgcttgactcactggcggatagataatgcagtgggggtttccagagcaggatgactaagcggctgtgtgacataaagaagcactcccgaggcctaactagatagcaacgcagacacctttccacctctcttctcagtagtcaccccatggtgttctcctctctagcaccctactactcccagtgacgactctgctctcacacctgtttcgcaggcagggctgtcggtgcccctcaggggtcccctcttcaataaatatattctagctcggaacaccggcgaatatgaaagaatgatgaaagagaactatcatactatagtcccatattgtaatgattctgaagaggaattatctctacgttctcaacgcctgatcaaaactcaaaactcatatcgcaaaacgtatcccacgtctcggatgtatggcacatggctcagagcccaggcgacacaccgcaccaagagcggcaactcattcgctccatcctgatccccgaatctcgctatatcacgcaggcgtagacgcggagccaaggcttccagggcctgtggctgatcgagtccccagtacatggatgtccccgtagctttggcgatctggctccggtgctgcaccgcaatcataatcgatccaaccgcatcaaatatcaattgtcccgagggaaaccgttccaccaggcgttgcaataggcccttgccttcctcctcggtgagatacatcaccagcccctctagcaagatcaatgttgggcgatccgcgggtatgtcctgaagccatgcgtcctccatgaccgacgcatcgaccaatcgatagtctccgccgggggtcggtagcagtttacggcggagagcaacaacatcgggaagatccagatcgatccaccgcaccttgggtccccactggagacggagggagcggctgtcgaggccgcatgctagacagataacggtcgccccggtgtcctcgtgacgttcgataaattctgtagtccatcggtcgaacgtgcggctacgcatacagatcgcgctgaactgcatgcggtccatcttgagtttggcaaagtcgtagtcgatctgatccaggattcgccccgcccacaggtcgttgagaatgggttgtggatgctgcgcatccttgaatcggcctaagagcgtgcccagcatggtttcttgcgcgccggtaaggtgtattttcttgttatcggccgacggcgcccggacattgttgtcccgccggcgaatttgcatttggatcctgaacgaaggaaggatgaagttacccataactgtcggggcgggccgctctgcgatgttcttgagatcgtagttcaggaccatgtacgcaatcgccagctttagttcatgcgctacaaagaaacggccgggactgaagtagccagcaatgaggaaatgatttgaattctggagaatgcgtgcaccacttaccaggcgtgtctgccatgaccgaagatgagatgggtttcactggttgtgaccattcccatcttccggtatttctctccttcagcaggatccttgcttccatcgctctgggccgcgtattcttcgataggtcgggaatatcggaatgcatcgtaagactctgggttttcatacaagtcggggtcatggtaaataccattcaagttcagcgtcaaggtacttccgtagggtatatgccatccttcgtccttgtgggtgatgccctcgcgagcaatgaccttgtgatccaagagagtgacggcgaaattgctgcgcctttggctctcccgaatggcactatcaattcggtatagtttggcgagacccgccttgctccactgatagttctcctctcggaatacacgatcggcctcctcacgaagggcctcaagcacggagggatcagcggcgaggatatcgatcatggcattctgcgccgtcatagctgtcgtgtgaatcgaggcaacctccaccagcagcgtccgctgagcgattttagacgctttcaactcggttagatcgccttcgagccgagcctgtcgaatgcaccaggtgatgaaatcttccggctcggtccagctattgtaggctggatcaccgttggcttttctctccatatccatgagccgtttttggatcacaggaagggtcattctgatagcccggcgatggtgaaaccagttgggaatcgccaataacgggccgagcagaggatggaggcttcggggtaaaaagtctaataggaagacattccgcaagacgctttcggtgaatccaaccatgctgctcaacagcttcgagttccgccccaggtcttttcccaggaccatccggttcgtaatctgcggaatgagacccagccacatgtcccagatattgagacttttccatttttgcgtatccagcccgaactctcggtcaatggaatcttgaacctcttcctgcatgccgggagtgagttcaccgagggcccggatcaggttcctgccgattgcgcgattgttaaacggatcctggggatgcgcattgcccagaaaattatatcttgcgtaaagcgagtcattgttggcttcgtctgcgctgatcacctcgtccgattgttccagcaaccatcggatctgggattggggcaggaccaccgcagaacgtcgaccaaagccccagggcacaatgaatggccgattgttttttgtgtactggaggaagaagcttagaaagttgtaatagcctttttatgcagtctggtccacataccttctcgtatccctcttctacccaaaccttgtgtcgagcgtaggccaacagaaaattctgtatcgttgctagaaagcccttaccgtatcctacttgaggtagcgagtcggataagacgccttggtcccatttggccacgagtagggtaagtatgaagataccaagtgccccgatgatgtggtttgtagtgatgcctaggacaaaactctccatggcgccaaccatatgtctcgtcgagacatcgacacctaacacggtggagtgaaacgacatcttctcttattttccctttactcgaagatgagaagtggaatccctacttgacactcagtttccagatttctacttgaaggtgtgtctgtcgctggccattcgatctccgtctccgaaccactcggattcggccctccgagcgcacaagagccacctccggcagggaactaactacgcgatattatttcatcgcatagaagatagatttacctgtattcattcgatgtgttcgtcttaatgtcacatcgggtgtgggaactcgcagtcttcgccataacggcgacttataagcatcttctcaacctgttgttatcccctcagtatctcgcttttcccatctatccgtctgcgaataaatccataccagaagcaaccatgaccaccacggccagtacacaggtgcaggaggagtacaagtccctcaccgcagatctcccacccccgccgaggggcgacatcaccacgccggtcctgttttcccatgaatttgaccaaggcaccaatggatacatgttcatcaagaacccaccgccagccggtgtgccgtacaccaacatccgccctgccccctccatagtgacggtggaagacctccgtggcaaggaagacagcgtcaccctcgaccatgactcgctgcagatcctgcagggactgacagacatgccacgcagcccagcggttgactgggactcagacaccagcatcgaaaccaccttctacccggcggtcgaggcggccatcaagaaagcaatctcgaggtcacacaccgtgcacatcttccgccacggcatccggcactcgaagaactggcctgtcccgtacaatccaccggccatgatcgcccatctagaccaaaccggtcccgcggcagtcaaccgagtgctaaggcacatgggcccggtcgacggcccgcgcttgctgcaaggacggtaccggatcgttcatttctggacgcccctcaacggccccgtctatacgtgccccgtggccatcgccagttcggccactgtcaaggatgaggatattcgcatctttattagtcatctcggtggggtcggcggcctgggcatgcccttgggccggcccgtggcaaagccggatcctgccgagcagtaccgcgaagattttggggctccgcggtacgcggaaggacagcgatggttctatttaagtgggatctcacaggacgaggctatgttaatccagatctttgattccaaggcgttgacgaaaggaagtgaagtaaaggggggtcgggcagtccattcggccttccgtgaccccaggacaccacagggtgctcccgatcgttggagcattgaggtctcctgtcttgtttttagtgacgagtgatgcttttcttttggggtttaattccgtgaaggataggtgcaattagttgcagtgcgaagggcatattcatattaggtaacaaagagcttttcatgtttgcattgtttgccagtagcctgtagggtaagaattattgtcggataaaccgtttccgtaaaatataggtccaatcaatggagttcaatcagtctgtatctctgtactggctcaactggcaatttatggagcctgattataaaataaaataaacaataacgtaactaattcacaagcgagtggccatctccaaaacacatattaaatgcaacatattctacatttatatctcaaccgtatgttcatcctatctccccgtttgtcgatagctattgataagacttatatatcaattttgaagagagtagaatactatcttactaccatttcaaaaattacagaaaattacgtccctaaaagctagaaatatatatatcgcagttataaagccattaattttcctaaggctgcctagatatgctagatatcatatctaaagcgctatgctacaaagacaagtccctatagactaccgttgttgagatatcaagttgtaatttattacatttactatgtgttttggagatggccactcgcttgtggtggccgctcgcttgtgaattacgttacacattgttaggattaatagatcctccggtattctctggtatgccgaccctgcgttctccgacaattatacttccattgacaaacatatatatgacattctgctttcacattattagacaaacgaattccataataaatcacttctctcaagtcaatcctcgatcgctatatgacgacaatcattctttcttttctacgaccaaagatgtatccacacccgcttcagaatccttggcattctcagacttgcccttctcgtccagtccgaactcagtgtccaactcttgacgcaaaggaacatccttttccaagagcacaaccagtaaccccaaagctgcaaaggcaatggccacttgccaagtcctcttgatgctatctgacagaactgaaacgaactgcttcagggtttctgacggcaaagtgttacgaaacgcggcggtagcatgctcgtatgcttgtccgccgagaagctcggtacgaactcgctggtctccgatgcgtccgggagcaaggctatcgaagcgattgttcaagatggctgctggaatggccgttccccactgcacacaatgtttggattagtattgagtctcgtttgcagggtctgaggtctcgtaccatcatgccaaaggttcgcaggaatgaccaagttgcagtggccagcgcggtgtcagcttctgtcaatggtgccaggacggcaggaagtaacgtgggaatgactatatggaggggtgagcagaagacaaaaaggggcaaatcgaatggtccatacctagacccgcaccagcagactgtatgatctgaaatcctacccaactgcctgtgttggagcgctcgtctagcagagtcaacagtccgaagccgataatcaccaaagcaaaaccagcaccatggatgaaccgatattgacctagcttcgacatcagggttccccctaggccagcaaacggtactagcgccagaatggtcggcaacaactgaataccagatcgggtggtcgatgaacccaggaccccttggaagtaaacgggtaggaagaagagtgcccagattgtgatgatcccgtgtaggaaggtcagaatgaacgctatcgcggacgtccggttcgaaaagagatggaggggcatcattggatggggagcgagtcgcggcgacgcttcaaacaacatgaagcccactaaacccagcatgccgatgaccaaaggcacaataacgtggtaggacgaccacggatacacggcgccggcccaggagagcgcgataagctatgccaattagccatcaaggccccagcgggaagatcatgaatgaaacaaaatcaaaatcagacgtacaatagcgcttatggtcgccacaaaaagcacgttgcccaaccaatcgatctgcgttagcttatccgcaaaggtcttttcctgattgtacttcacatgaaggaacaggatcaggatcaccaacgccacgccaccaatcggcaggttcagataaaacacccaacgccaggtggtgtgttggacaatgaggccgccgaataaggggcccaaggccgtgccgagcgcaatgacgccgaagatcataccaatgtattgccctcgttgacgtaacgggatcaagtcacagacaatgatctcaatgaggacgttgattcctccggcacccacaccctggatcacgcgtccagctattagcattgacatattgctcgcgccgccgccgattccgctgcccaagatgaaggtggcggtggaaatgatggtgggccagcgtcgtccgaatacattggccagctgtccctgcagcggttgcaaggcggtcctgatggtgggttggttcgtcagcgcgcctcggacggggaatcagggggtgggcattggtcgcggtacatacatggcaagaaaatagccgttcacggcccagacatagcggtcacctccgcccaaatctgcgatgattgaaggcagtgcggtggaggtgatggtgccctccagggcagtcatcatgcccacaaagcaaatggcgacgaggatggcatagaaacggggccctttcttgaaggtagcggcagcagccgcggacttgggtgggttcgtggggccactgcccggctccccgtcagcatgttggttttggcctggacctgtctgttccggtgtcatctttcttgctgttaagtccctcggggcggatagtgactgtgtgggtggtgaaatggtgagactggcaggtaagagtgacaagattggagcagccctcactcgggggaatggccagggtatccatcatagcgaggcgtgcacattctttgtttgatcgatttcactattccggaacggagtcttgatttctaatctgatgcaggttcggagtcggacatctccagtacattgattcggagagggtgccattggtcactgtcctccacactgctccacattgcccccaaatttcgcgtaagcttctttgtagcttgttcatcgaatcaatttatccccatagtaataataatgacagttgttgagagatcggtgcatgaatttcctctacctattcctatctctcgagacatttactgtcttccttgggaaatatcaacaagttctccggtgagatgggaaggtctcctggtatggggctggtggcacggacccttaggggtaaagtgggtatcacgggagctctccgagacactaggccgaagagagttagatctatttgttattttgtggagatgaaatatgtacacgtttttttccgatcacaatgtagggttttttttgactatgtggagtagaattcaaaagtgtagaattaagtctggcagaactgagttgatgccttatgtgtaaagcagaatcaggcagaggggggtcccattagccaagtggggggatccctgtaacgatcccctttttctcttgtttgaaactgcgtttgctttcttataggcttatacaagttatttcgttaaacgatgagtacaaacaaatggagcatgtaattatatagtttcgaatggctcagccgacacacaccagtttacttttgtgtgccacaagggtcgccaatgcggtcactgaggagctatgcatcacgtcgaaaagagagcactcggcctcgaatgtggccaccagccaattgcgcagctcaaccgccactaatgaatccacaccaaactgcgaaagcgacatgttggggtctatttccgacaccggcctgctaaacatgcctgcgagaatcccgaccagggcgtgtgtgatggtctggacggcctcaagcaacgtcgtcgacgcggtaagctgcttcttgatgttgggcccgctaccgtcaggaccggcggagccttccccggaaccggtgaggtcaccgcgctgttctaacccagcaaaacgggtatcatgattccagaatgcagctgaatcagaccgggtaaacgtggacgggatgcctgtgactacctggcatgttgtggatgttcgacggggatcccggatcgcggattcgaccaggcccaggacttcctgttcagacacagctcgcagccccagtttggtgagatggtctgcaactcgctgcgtccctgcgaccacacctacagacgagaccattcccagatcaattgacacagcagataggccctgtgccgcgcgatgtcgggcgagagcatcttgaaagctccccccggcagcgtagttcgcctgtcccgcatttcctccaaagccgctgatcgaggagagaaggacgaagaaatccgcatccagcaacagttcatgaagattccagctgccctggaccttcggacggagggcggccatgtaatcagcccacttcatctgttcaaagatgcagtcctatccagggcggttagcgggagtgaaaaactggaaacatcggtcggtctgttgttggccgttgacttaccttgagaaccatggccgcttggatgacccccttcaccggtagcatgcggcgagcacagtctgcaaaaacagccatcagctgactcttatcggcgatgtcgcagctgtgcagggtaacggtcgtgccatgggcttcaagagagcggacaaacgctttcctagaatgatcgagcgtcgaggcactgcgggagagcaggacgagatgacgggctcctctgtcaactagcatttgggccaccgattttcctatgccaccgaggccaccaacaaccaagtagctcgccttaggggagagaataataggtttgggagcgggcggcaggacctggatgtatgtattagctgtagtttccagagcgacttcgtcctaggacttgtcctaccttgacaatatcgccgggccgtggctgtaaaatgattttgcctatatgtttccccgtttgcatcgtgcggaaggctttctccacctcgcccatggagaacgttgtaatagggctcaccggacggatttgaccggcctcgagcagggtgttgatctcgccaaagatgcgggccacttccggtccacgctgttcccccagagtaatcaagtccagcgaggcaaagagaacactgcggacgaagggccccatctcgaccatactgttctgctcaatgtccttctttccaatttcgatgaaacgaccaaaggtgccaatgcagcgccatgtctggcggagaagagggccggcgagggagttcaacaccacatcgactccctttccgttcgtggcgtgcatgatatgatccacgaaggaatcgtttcgactgctgaatatccgagacggagagatgccgtagtgctcagcgatgaagtctcgcttctcctccgacccaacggtcacaaagatctctgcgccagctgcctgggccagcatgatggccgcttgcccgactccaccggttcccgaatggatgagaacagtctctccgggcttcagatgagccaaatcgtaaagggcatggtaagcggtaataaatacaagcggaactgaagcagccgtggggaaatccatacccacggggataggcgcaacgctggtgtatgggatgcgcacacgggtggcaaagtacccgatgataaaggcgtatacataatccccttccctgaaaccggccgcgcgagcttgaggagtgacatgggcgatgactccgctacattcaaatcccatccggatttcatccaactgacccagggcaaccatgacatcgcggaaattgagtccaaaggctcgtggctcgatttcgacataaccgtcaggtagcggctcattcgccaaaggatcatggccaaattccaggctgctaaggagacccggagtggtcactccgaggcgaactggatggccgatctcaaagaagggcttgagctccggttctctccgcagagagagaccagagacgagctgggtttcgtgcacgttttcgcaaacacgtgaaatgtggactacattggatcgaacagaatattccgtttccagtttgttatggggcgaaagataaaagccgacgtgtaggatacgtgcgaccacatcggccgagtgtgcactccatgccgcagattccggagccaggtccaaggagacatagcgcttggcagtgttctcacatcggagggtccgtaacaaaccctgatggagagcaccccacggctcctccgtaatcgcttgggccccccgagatacccataaggagccctgggagaagcccaacaaatggcgcagggcgttgaactgatcctgagtgagattatggagaagagggctaaccagatcatcgaggaagacacaaacaccactctcaacgttgaccgcctcttccaaggagtgaaccgacaaactgtaggaaccgtgttgatgaagggtggccctgagggactgtacccagctctccggcggtgcagctgtggagtacaccaacatgatctggcgtgatgatggcagttccttcgccacctccggtggaagaattgaagccaaaattacttcacctcgatatgattcggcatcgaggccctgtacaacctgaagggcgcaggggtccaatccagctcgctcgagtgggcccttccacgattcgagggaggtgactcccttccattgcggcatcagcctcaggataacctggattgcagaatcctgaatgctgtgtccaaatatcagacatttgcctcccggcttgagcaaggttcgaacattcttgagaatctgttcaacgtccccagtgatacacagcgcagaggatagaatgattaaatcgtatgtctcaggactaaagccttgatcctctggaaactcgctaggggtgtaggtcttgaagtgaactcgcccatcataatccttcaatgcatcctcatctgttgtagcccgtgcctcttgcagctccagagtcgccatatcgtagtcactgaaacctcggtccgtgcctgctgtcaatgcatctagtatcatacgggtcgtctggaaactgccattgctgatttcaagaatcttggactggggtgacttgtagctgtacagacctagcaggtcctggacaacagagacgcaaaagtcagctggctgagatgaagacctttccagaagttcgaagtgacaatgctcagccacgattcgagcgtccgtttgtccagaaaggatatcaggtaatgctcgagcaaatcgggtgagaagccttccttcctcgacctcttccaggtccgacgccagcgccaggacgtattccgcgctcatgccatcgaggtctagtgtgggccgagcctcgtcgacgacgctcttcatccaagtccaataagcttgattgtctgccgtgacagtctcttctttaatctcgcggagcactgcagaaagaaagacaacggccatctcctggagtcgcgagaatttgagctgtttggcaccgagattagaagcttgggagggacgcagatcggcggcagtgacaaagtccacgtctggtttccagatagcctggtaacagaggttgtcatgcggctcatcaatcgtagctgtcccgcccagtgaccgaaagaataatccctcgatcctcagtaccggctcccgatggggaccgggggtggttgcatcgacgagccggacagaggactcaaatccgtgaggaccggaccggatgagggacgaatgagactcaaaaatgtgtccaggctctgcactcaacgaagacgcaatgtacaatgacttgatagcggtcggaatcagggccgttcgttggtccgttcctccggagggtaggttatggtataccccctggaaaaccgagtccagggtggtcggttgtatgagatggggttgttgatggcggtgcggcatggagtcagccgtatcagccactttgaatgttgagatagagtgcccaggcatcgattgcgcagcgatcaagttctgaaatatcgggccgtgattcacgcctacggcgtgcaatgccttgtatgtatccgccggatcaattgttctccagttcccttgctctgcttgattatcaatccccgaatcgacgaaagccgggccaacccatccacttccgttatgtggtgcgatagttgcacactgaccctcacagtgaatagtccacttgccctgagtatcaaccgactggatctggaagtcataccagccctggacccgaaggactccgtcggccgtggggcgcatggatgtgcgaacctcgactccggcggccgatgtatcgtcgaggatgagcggattgcggatctgaacatcctgcagctggtaccccgatggagttagcgagaattcaccgccaccaagttgacgcagaccctccacgaccatactgatgtagcccgctccgggataaataatggacccctggacgacgtgatctcgcacccagggaacgtcccgaggacgaatgacatagcgccagctgggtgttgaaggggtggaatcggcggcggcaacgcccaatagatcgtggggtgcgaaagtccttgtccgcaggtcacggttcatgcgtggttcagtccagtaggacgtctcgtgattccatggatatgtcggcagatcggtgagcatcggtattccctggtggctgtaagggaaattgaccgccccgagatccaccggatagccttgtttgactaacgacgagaccagacggtgcatggtctgcacggcattctccccccttgtcaagcacgactcgtaagcgattcccgctggctgtagctctgggagctgaagggtctgtcggaccggaccggccagagcgccgtgcggcccgacttcgatgagcagatcaaccgcgggcgtgccatcagtctccgccggattaacacagaggttgcgaagggcgtcgagaaactccacaggctgtaccatgtttcgtacccagtgctctggactcgcgatttcttctccggagtacatacgatcgcctgtcgtcggggatgagtaggtaattcccccgtcataaccgggttctggctgcaagaaccgggacaacatttccctatagtcgtcggcaatgggcagcatatggtgagagtgataagccgcttcgacctttaggcggcgagcaaacacctgctcttgcgctagaattgcctctatctcctcaatagcgatcatatcgcccgagatagtcacgctggatgggctgttgacgcacgcaatgacggctttcccagattgaacccgggagagcacggcttgggcattctcgcgacccagaccgacggccaccatcccgcctgcacggtcgagcagcctttgaaactgactggtcagatcgccccggctgtagacgatggccatggcggccgacaggctgatagccccggcggcatatgcagcgccaacctctccgctcgaatggccggtgactccggtggggtgaatgccccaggatcggaggagattgactagggcgatttggaccgcgaccgacagcggcaggctatgggagacttgattgacgcggctctcgttggcatcgcgctgcaactcctcgaccaccgaccagcttgctcccatagagcggaggcattcatccacctccccgatagtctgccaaaagacaggataggcgcttaagagctcccgtcccatggcgtgccactgggcaccttggccagtgaaaatcattcccagccggggagcccgcgaactgcgatggggagacagctgtgtggagtcaagcgtcgactgcagggcggccagcgagtctgcttggcaggccactgtccatgcaaaccgggaccgtcgttgccctagtgtaagtgccagttgatccatgagatggtcatttttcgactcggatcgttctcctgcctctgaaacatattgtcgcagttggtcgaccatggtccgggtcgtctgttggtctttggcgctgagcacgaacactcgagaccgggccttgggattcggggagcatagctctgtcgacggggccaagagaggaaggagatattgtgggtgttcgaggatagcgtgtgcattggcgcctccatagccgaagttattgatcgacgctcgacgtagcgagtgtgagggccatgactgcaggctgagcgggatctatccaaggtatgggatcagtgattggtatccataggcgccacgagtcaaaatggattgctttggcctacctttagtttcaaagtctccagcgagatcttctcgttgggggactcatagttcaaatgcggtgggattttccccttctctaatgccatgaccgccttgataatacctgcaagaccacttgccgcttccgtatggccaatgttcgtcttgaccgatccgatcagaagcgggtgttccccgggtcggccattgccaaagaccgtgcccagtgcatgcgcttcaatggtgtctccagcctgggtcccggtcccgtgggcctcgacataggccgtatcaacggggtttagagccgccacttcatagcattcccgcatgagcgtctgctgtgcctcctggctcggtgacgtcagggtggccgttttcccatcctggttagcggcggtattgcggatcaccgcgcgaatgggatcgccgtcgcggagggccgtctccaggggcttaattaggatggtggccacgccgtccccgcgaccataccccgatgcccgggagtcaaaagcaaagcactttccttccgcggagagaagactaattcttgtcagaaatttctctcttacgttccctccctgttcaagtctgaacgtacctgaggttggttccggaaataaacatatccgggttcaggagaacattcgatccccctacgatggccatgttgctctcgttagctcgcaggctctggcaggctagatgaagtagggtgagagtggtggagcagccggtgtcgatcatgagactggggcctcgtagatcatagaaatgggatacccggtttgcaatcatggccgccccattccctgtcaaatagaagcgcgcaagggtgtctgggtctcgcattaagctgtcgtgattatctcgaaagcaggtccctgcaaacacggccgttcgcgagcccgccacctgttcgaggggaatgccggcattctccaacgcctcgtataccgtttccagttgcattctgacctccgggtccattgcctggtctcgtcagtttgcaagaaaaatgtcagggtggaatggtgcccttacactagccgtttcggaagagaggttgaaaaacgacgcatcaaattgggaggcatcttgggttagaaagtgtgctcctttcacgtacgactatagaaaaaccaaaacagacactcgttagaccacttattgaacccggaatggatatagatggaggtggaaagatgaaataccgtcccgaggtgctccttgtctggatgataccaggccgcctggttgaagcgattcgaaggaatgggggaccaggcactgcgggcgttggcacaaagttcccacagcttttcggggctggtggcatccccaggaaagcggcaggccatgccaatgacggcaatgggcatgacgggcaggtcaagctctggtgcgagggagtgatccgtatcgccatcgctgggactaggagttggagacactgggataatcattgggcgaaccgctggatcgatgagctgtcaaaatggcgatattggttaaatcgctgacctttgcgcacagatccgttcattttaacgttattattataggttgtctcgctggcgagctttccttattgtcagtatacgctgtgtggctctccatcttcggatcggacattgtcatcttgttcggtcggagtcggagaagacaaagaaacagacattggagggttgagggtctggatggatccattaacgctaagcagggactgttgtctcaaacgacaaagaagaggcgtcggaatgactccgttcggtctagggggaagagaggcttactggctagcctatccgggtatgggttcggtgttaccccaatgtttgaattgattaataaattgataaatggcctgtcatccatttagtaagattgggggtcgttattctgtgctctccctcattcttccctgctctaatacctaccgagtatatatttcccttccagacggccttctcttgcgaaatacctcgcgatggccttcaacgcccagaataccactaaccaaggcgatatctcgcaagatgccatcctcgaccacccccccgaggacagtatctccgaactggcctggtcgcctatcgccaaccatctcgccgtatcgtcctgggaccataatgtacggatttacgatgtgacgcgctcggttaagggcgaaggcaaggcgatgttctccttcggcgggcccgtcctgagttgtgcctggtcgcccgacggctccaaggttgtgggcgcgggggccgacgggtcggcgcgtctcgtagatctagcaagcggcaaccccactacagctcaggcccagcaggtggcgcaacatgatgcccccgtgcgcagcgtgcgcatggtccaaattcccaacagtcaggtgccgatcgtcgtcaccgggtcgtgggatcgcaccgtcaagtactgggacctacgccagtccaccccgcttggcgtcctggaatgttccgagcgagtgtatgccatggagatctgccagggccaattgctggtcgccttggccgatcgccagatcagcctcgtcaatctcaaccagcccacttccgtcttcaaaaccctacagagtccgttgaagcatcagacgaggaccatctgctggatccccgacgggtccggctttgcggtcggcagcattgaaggccgatgcggcgtcaactatattgacgacgccaaaaagcagtgagtagctaacccgcacccatataatatccccgatagattaatttccagggagaaagaattgccctgatggagatgtgacccgcagatcaaactttaccttccgatgtcaacgcacccccaaagacaacgaccccaagaaccaactggtttattcggtcaatgcagtatccttccatccgcgctaccacaccttcagcactgccggctccgatggcacctactgtttctgggacaaagacgcccaccatcggctcaagtcgttccctgccgtcggacacagcatcacctctaccgcctttaacctcgacggcagtatcttcgcctatgcgatcggctatgactggagtaaaggctacgcctacaacacgcgcgattatccgactaagatcgccttgcacccggtgtccgacgccgaatgtaagccgaaggcgaccatgaccactcggaggtgacaatcggggtcggaagatagctggataacacaatgtcagaaataatgttccgatgtgttacaacactgcgaaggggcagaacggccaaatgtcaaatgcctgaccaggttcgtggtctgaatatgcctgaatatagactggcagaaatcaaaatacctgaagttatcatgacaacgggcttgataaacaaagcatctaatgttggaagttggaacttagttcaaaaaatgaagttattcctaccatacaaatttccgtatacacccgttttgtacggtcggagatttatggcgtttcaatttatagtacacggtaactatagagcggtgtcgaaagcggtctataattcgggcaaattcaggtataaaccctgaaaaatcgggcagggggcagttcacccaacctgtagcccacccaaggcacgtgactggtaacctatcttatctccaccggttgggtcaacttctataatttggttttaaacctcaccaatacctcaccaataccaactttccaccaatcatttctcgtcaatacctctcatcaaccaccgaggcgaatcagggagaaataacacattaattgcggagcgaagcgaagcaattaaatcataacctcgtgtgcatgtcacgtgaacgttcttttctcctatgggctccaaaatcattagaatcaatgtggtgaagtagtcggctagctttagcagaataatccaaccaatgagctttttttctcatcaaaatgcatgtttttttactatgtaaatcaagattccaaagtgcagaattaagtccggcaaaattaaatcgatgcttgattagtaagattgaatcccgaaaaatcagagaggggggtgtcggattatccaaggagggtgaacaatcccctatttttattagtggtttacatacaaattgtaggtacctactgccggtggagatctcatgtgattccggcgggtcaccggttggaccaaaaaatggcacacaggttgggtgaactatcgtctcgagtgagagctcccaactagaacattggtccattgtctaccgaaaaatggccattttgtctacccgcgccagataaattggcttcaagacgacataagccatacccttcaatactttcgttgatcgaatcctaaaaggtttcttccattctctgtttcgagaggctggcaccggtattttctgatctcgcaacgcacactcttctcgttgcctgctttgcgccgaaagctttctgacgccctgaaccataccccataaataaacaaaaagagcgataaagaagacatcacgttccagcggtaataacgacacgaatctgcatcacagtattgtcgacaaacgaaagtaaatagaaagacagatacgaaaatacaaagcgtaaacctccacggcgcgggttagcagctagtacccgagggttagaaaatgtgtcctataggattggatgtctgtagaacccaaggggttccaatgtgtacgggcgactaagtgtgtgtgcgccccagagggtggtctgatgtgtgctttttctgattcaatccgggggagggaccggaagagattttcacttctatgataaacttcgcaaaattgcgaagagagaaaaggagagttgaaaaatcagaggagaaaggagtgggtggatcttctgccgtcccgagtaactttcgtcggcccgaggccgtcggcccggagcggccggccttggcaatgcttgggcaaactctccagccaactttggactccagatcagtttatactgagctccacttaatttgccaagtctgggcgaaagaatcggcgggccattttgccaaattccaggcatcaaggccccaatctactgaaaacgaccctacgctatgccccttcgtacctggggggtcccagactagtataaggtaaattttttgactagaatgtgaagctcactgctgaaattaacggccagctcaacgtttgagaactttcttggagatgccatacgatgtatcagtcagaatgctctagcgtttaaactcgtgaatagatccgtatcaatagctgcatacaaaaatcaatagaaacaatctctctaccccgattaccacgtcagcaacatagctacccccttagacacccaagaaccttgccgcgtcagccctcccgatgtaagtcgtggacgtgccaccaaccgtgggaacaccactttgacgtcaggtctatccatctgaccaagatactcgaccaacagtgcactgaggcctgcctgctgggcctccttcaaccactcccccatgggtaatgcccgatacgatgcacccgtacccttctccaagtatcgttgtattccatgtagtgggatctgctccccaagatggtgaaggtaccgtacctgattcaagggagagggatcccgaggtgccagaatctcgcgtacaatatcccgagccacctgttccacaggcacaaagtcgagatagccctgccacgaggacttcgcggggagaggaaccgcacgtagtttcctagagaactcgaggagattgtccatcaagtccaagggggatgatccctcgccagtgacgctggaagggcgatgtatccagacggggaagtccgctttccggttcgcctcttcgagcacgcgctcgctggcccacttggaactcaagtatccctgggatccatcggtcggaggtaggacgctggcagcggagacctctgcgaaagtcgaggattgggtgaaattggcgacgccgctggtggaaacgtagtggactggcacctggcgcggccacgccagctggagcaactcgatggtcgaatccacgttggctcgacgaagggccggataattcttgaggaagctgacatcggctccgttgtggatcaccgcgtcagcatcattgaagatcgcggtggcttgggcttctacaagtcccaacctcggcagcgtaagatccccgtagtgcacaataatcttgcctgcggtgaccagaggagggcgccgagtgctcgtaacccggacggcaatgcagtgaacggtggctacggccgggtcttccaccagccgctggaggagagctcgcccgataaatccagtggcaccggtgagcacaatgcagagccctttcagattctctaatcgagttgtaggggccatcggtgttgacagctgaagctggtcgggaagctgaatttcctgctcccaaatgatgggcgctgctgccgttgtagcaacgggaccagcggcaattttcgccgcatcggtcgacgggtcgaggaggagagccatcttctgcaccgtggtcgctccgaatagctgcactagcggaatttccgtgcggaactccactttgatctgccgctgcaactccacgagcagcatggagttgcctccaaccgcgaaaaagtcggactcgggctctagtccatggatggcgataacatccttcgagatgaccgaccgccaaagctcgacaagccgggcttctgttcccgtgagctgcgaggtgagacccaccgattctgcctcggtctgcggaaggcttcgagtgctcaaggccttgcggtcaagcttgccgtgggctgtgactggcatgtcatccacggggagcaccatggacggccacatgtaacgaggcagaggcagagatttgctaagttcccgcaaggattgcttgcgttgctccacaggatatccggcaaggaaaatcacataagcgaccagcagttccgtgttggtattggagcctgtatagagagtgacgacggcctccttaagcatcccttgcgatgattgaaggatcaccgtttcgatatcgcgcaagtcgacgcggtagccgcgcaacttcacctgggtgtccccgttaatccgaccctcgatttgaagttgtccgtctggccggattcgcccgcgatcgccggtgaggtgaacccgtcgccatccttgagccttttgttcggccgtggcgaatcggtcctccatgaagcgactgcgtgatagatcctcgttgttcaagtacccatgcgcgatcccaggaccaccaataagtatctggcctggaataccaacgggaacggggttgagcgcttcgtcgactatgtagatggagtaattcggggccgtgtatccggcgacgaccgacccacggtgcatccactcctgtggactctgggttttgctgcggaggtacggcacttgcagtttgttggaagacatgctggcttcggttgggccgtacccgttgaaaagtcgaagatcccgcttgttcaactcttggaaatcatgaatcatgctcgaagtcatcggctcccctgcactgaccgcagtcctccatttggacttcttgagacccgacaaatcaccgtgcataaaccaactgtgatattcggaaggagtggcccctgcgacggtgataccctccgtaagaatcgattccaccaaggccaccggatcaccacgtttagacagcggggcaatgaaaagcgaagcggcgtttgccaacgccatgaacacctgccataccgaaaagtcaaagctgaaagcaatttgctgcagcaggtgatcgtgcggccagagtcggaactcctcctggtttccttcgacgttgacgcgcaggttctcgtgggtcaatgcaatgcctttgggagcaccagtcgaaccgctagtataaaatatcacggctggatcttccaagacggcacgattgacgacagggatagggaaggacattggtaaatcgtagatgttcattgacagtgcgttcgaacaccccaattcgtccacttgatctttcgtctcattgtccacgagaaggaccataggcttacagtcatcacagatcgatttgagacgtggaatttcgagccgaagatcgagcggaacataagtagctcccactcgcagaatggccagcatagaacagatccagtcggccgttggatgctgaaacacacccacacgttggccacggctgacgttggcgcctaacagagcgaacgcaattgagtcgattcgttgactcatttcctcaaaagtgaatcggttgttgaggccgtctttcaaagcaagtttcttggggaaccgttgcaccatcgtgtcaatacgatgggggagcgttgctggccatcggctgggcactgtcgggcctgtgtaatacaaagacatcgttaatagtggcgagatcaggcttgggggtgcgtgcttaccttggctgagtgcaagggacctttgaacatcctttacagcgaatatagacgcctggcccacgggggtagatggatcattggcaaagactgcgaccatgtttagaaaggcgttcagaagagtctcagctgcttcggtactgtatagggattgctggaggccaagaatgaccaatggctcgccttccactttgtcgacaatatccaaagcaacatcgtaggatgttcgacccatttcataatctagaccttcgaatagacattctccgaactgccgtttctcgcggacatcctgccgataatccatgaaaacttggaacaacgggttatgggatggcgatctcggaaccttgagttcggatagcagaatatcgaatggcacctgtgagtgagctaaagaactgtagaccttcttacgagctgatcgagttaactcaacgaaaggcgtgttggcatcatagtgcaaaggtagggcgagcagattcaagtatggccccacgctgtcagctgcttctacctgaatacggttggcatcagccatgccgatgcagatatcctgggtctcagcgagtcgacagagcagtgcctggaatgctgcaagatagaaatgcgaaggcgtgcatttgacagattggcaaaactggcggatttgtcttcctagacttgggttcaggcgttgttgcactcggtgatgaccatatcgtaacagagcttggcggtcagatacacacgcgaaaggcagtaatggaaagtccgctgggggttcgggaaatctctctctccagaaggccaagtcttcattccacgagccgttatttcgctgctgacgttgtttggccgcgtaatcggggtactgaagtactcgcgtactgagagaacgtccttcgtaggtgttttgcagttcagagagaatcacctccaggctaacaccatccatgttgatatggtggtatccaattatcaggaagtgcaccaggggtgttgccaacaccgcagggcacaacagaagcaccctcattagctgtccatgctcaaggtcgtagatgtgattcttaacctctcgcatagtagcctcaacttcagacattgtgtgataagtcttcctttccagagacaacgttgagtgtggcaggatgatttgcgtaggtgattctccatcctccgcagaaaagcatgttcttagggcttcatgtcgttggcccaccccttgaactgctcgctcaagggcatcaactgaaaaggcgccctggattcgtaatgaacaagtgatattaaaggtagtctgatcctcaaggtataagcggaggaaccagaaacgagattgtgcaaaggagagtggctccttccgtaacgccgagtggacactgtcgcccggctgcttcaggagattggcctggctcgggttatccggaagcggcaaattatgctcatcttcactgaatgaaggcgtttcgatgatgctgaaggacccggatgaagtgtcctcgcctcgggatatatcaacgagactggaggtggtgcttgcccgcgtagatgaactttggccattcgaaagagactttgaggagacagtccgtccaggtccaccgggtcttggccgagcaacagggtccgcagaactagccaacttgggaatactgccaagcttccgttccgaagtccgggattgaatctcagattgctgtctaacaacagcctcaccaacccgcggcacaggagcagctccaatgtttggggtcatctcggtaggaagcctatctaaggcgaagtggagaatgtcgtcaatggtggcacctcccaaaatgcgtagtaccgggatgtcaactttcagttccttcaagaaccaggatctgatttcgacagtgttcaatgaatcgattccaagctcatctgcagctttatcgaggatagaactgctggccacatcatgcaaacccagcataatctggagcttagcaaagaaagattctgccaccaagtcagtatctcgatggtatcccagagtggattcgaacataccttgaacaatcttggagatctcatcagctgttcttgcctcaagaagctgtagtcgaagcggcatctgcctcttggagtcgccatcggtttctgtggacaactcgtcgagaacgactagatgctggaatttcgggctgtatgaccataacggacgctgctcatcaacatctctgataatacgcagcccacatgtgagctccaccgtggcgttggaactaggagacccagcgaggatagcctctgcgaatattgtatggaagtcgccttctgacatccacacatgaccactcttcagaagatttctttgcagcgcctcgctcgtttcacgagtgacatagccgactcccatgatcgctccaatatttatgacagaacctgctagcccgcgctgtttgcggttcgctgctagtgcggtcatgaacatattggcagcggcgtagttggactggccgatattacctgtgacgcaagttgcagaggagaagaaaatcatgaagtctagaggatggatgtgggagaacaactcatccagatgaatgctgccggtcaccttcggtttcaacaccttttgcatagcttcgatgtccatgtccttaaccatggtgtcttgcagcaccatcgctccctgagccactccagcaattgggggaagattccgacagatgcggtcatatactgaccgcagactctctcggtccgtcacgtcgctgtgatctattagcttcgatttccttcgagaagccacgtttcttgctccatagagatagacttacccggcatatacttcaactctagctccagaggttctgagctcctggagaattgtaggatcgatgttggggtttcggctagtcagtaccacgttcatggcgccttgccaaatcaaccattgacaaagggacaaacccagggatcccgtcagaccgacaagccagtatgtcctgtcattgcgcaaaaagggataatggtcaaccctgcgaatcagggaagaaaccgttgaagtggatgtccagtcgatgaaggagaatgcagattggttcagagataggctactgatatcctggagtgggatgaagacctgctctgcttgtctcatggtagcggcatcatggtgtctctccgtggctatcatctgtatagtctcagtagggatgtgctcctctgaacttcgcacggtatcgctgcagaaattagcgagccgctcaaaggcagacgacgagtgcaatgccgagcgaagcttcaacgtcaggctgctgccctcagcgccgggtcgcatgtccaggaccatcaccggctcgttgggcagtaactgttgcaatgatcgtacgtgagtgtgcggatgcacaacaatccaggatggctgcatgtgattcccatctgaggtcaagaagataatgcgtaagcctctctgagaggcatggaatgctagtgccgatgaaacgaccttctcaggctcaatcacgatcagtgctgtatggctgtgggcagacgatacaatggagcgcgcaacagcatgggcggccgcgaacggtagcaacttcgtgggggagtcgtcgctaggaatggtccagctgctgggaatgtcgaccactgaagagttccttgcagcaaaaccaaagactttctcacccgttgcaacaactgtgccggcgaccaaatatagatcattaccgctaagtagacggaccgcctttagagaagatgcctcgacactaattcttttcgagcctgggggagtagcgggagagtcatactcagagccatgttcaacgacataagcccccgcattcccctttaccgtcacaatcttggagcggaggtcgacctcttccgcaattgctcgcctcgatgcattgtaccgcagattttgggcattattgagtaggatacgtggaatgaactccttatctcggatcacagccaattcttgctcggtgctccagagcagcctatttgctcgctcgggattgtctgatatgttcacaccgataaagcgcaggatagctcgtgcaataattagggcagctccagacgaactcaccgagtccaaatctaggaattgggattgaacatggggcatttcaacggtcattgagcgaccaaagccaaggctctgattttggtgaatattcccagcgcgagaatcctcagtcacccaaagaagataagctgatcgttcgtagatgagcttcagaccagccaacgcctctgcggtcatgttcttgaagacaggctcgtctagatccgaaagattcagcgtaaagtatccggaggaagtgggtgctttgctgagatcttgcagacagtctataaccgatacatgatcgaaacgggatttaagatgataaagaatttccttgcgcacgttatgcactgcatctgaggcgccgccaacgactagaatatccgttttggaatctaggaactcaccgctagattccaggggatcgcggaggaactggacagtgggatcgatcgcttgggagacgatggcagacgccgggaatggaagtgcatccgcatctggtgtaatactatcaatcccagaaaaaccagtcttgcgcagtaaccgatcccattcgtccgtggtcacgcaaggggagagtacccggccatcgtcagcaccgagccaccagccgggaaacgatccaaatatatatcctagacgtgactgctccaggttggtgacctctagcatgaccaaataccccccgggtttcagcaggcgtcggatgttattcagggtgtgttccaatctcgaagtcgcatgcaggacaaaggatgcaacaatgacgtcgtaggattcttcatggaacccttgagaagtaatatccttctctgcgtcgaggactttgaagagcatctggccggaatggctagagaacagttccctggcattctcaaagaacccgttggatatatcagtgaatgtatagctagaaaagctacgaccaacggtgctgatgactttcttcgtcgcactaccggtaccagcacctacaagtaatccattaatttagtaaagtctctcgttgacgatcgtgcgggaatgtacgtaccgatttcaaggattctcatgtggggataacgatgcacaatctgagctactacaccagcaaggtaatcactgaagtagccaattcccatggcttcttcatagtatctactcaggaggttgtcctttgtgagatactccaggatggtggattgaccctcgatgactttcgccatgtgttccccaatgatctgcatcacagcaagatcgacattgtcggggaacctaaaaactccttagcaaaagaaaaatatcgtttagtgaaacatgaccgacctttggctttcacgcataattacggcgtgagtatcatggatccagctccgttgagcgtaacggtgccgatcattctcaaccaagccagaaacatgggatgcaaatcgaagcaggccgaggtagggaccctcgtgacgagcttggtgagtggcgggaaatttaagatggagttggcggagatagaatattgacactctttccaggacataggcgagctcatagtcctcgttggtggctttcccagcaaaggtcaccgactctgtatctggcgatgaagggctccagaccattgagctgaaaaatggccgatcactggcagcgctagcagcttcaagaggcacagcatgtatgccttccatgcgggcaagcgtgtgctgaccatccggagagtagatatcaacatcacccaaggtgtcagaagcctccatttgagttaacacagcatcaagctggaaagcagtctgcacaattgggtcatatgagacacacaagcttggattcacagccacccgccggatcaccttgggaacttgaagacaccacaattgcccatcaccggggaagcttttggcaagcaaaacggcctgaatggacgcatctagcatggccgggtgcaaggtcagagaggctgaatcgggggtaggttctcggttgacaaaacctgtcgcgatacccagtttcctcttcatgtcggttagcgctcggaatgggcccgtataactgtatccgatagggtccagcgagttgtaaaacctttcactaggaacatcaatcatatcgacaagggatggtcgccgcaccggtagcgcatctggagtgggggtgccgtaggtgattatgagacgtcctgaagcgttcatggtcatggcggtcgactcctgcccgacggcagagtagaaggcgaagttggccagcaccgtgtccttctgtttgtggatgatatttgtgatagaaacaagcgtctccacggatgaactttcattgtcgaagatcatcgcctggcggatgactaggtcctccaactcgaccagccgaatagtctcgttgggcgccatattcttcgctgcttccaccgccgaagatacatagccagccccagggaaaaccatctgtccctgaatctgatggcctgagagccaagggacctcacgggggctcaagaaattccgccagcggaattcttgctccactccatccgggcaccgagagcccaggaggggatggactggagtcgatctactcctggtcgccttccatagccgcgattcgtaccagaatatgcgatcatggtcccaagcgtacgaaggcatgtctttgacaatttgcggttgagacccatccgatagtagcgcatcgtacctacacagatccacactggacggcggcagcgtctgccataggtatcctaggcaaccactcatcgcttcgagatcatgggagcctcgctgcaacgtccctgtgtagtccaaggacgcgtcaagcaagtcttgtattatctgcaaagttgggccacgcagggcaggatgaggtcccacttcaattgctaaagtaaacgggccatggccagcggtggcgctttcaaccgcttgagcaaagaggactgggtggaccatgttatcgctccagtatgtgtctgcaagatcgagcgctcctgcgactgttatgttcccttcccgcacgctggagtaccagacgggggctgagggtggcggatggccgattttgatattcaagtttttcaaggaggaaatatattgatcggagcaggctctcatgtggtgggagtgataggccttgtccacggccaatatgcgaacgaactttttctcttcatcaaaaacggctttggcttgctcaattgcttcggcatcaccggacagtgtgacactggccgaggaattgactgcggccaccgaaatccgtccgtggaactcaggctccttgcagagctcaagagcatcttcaagggaggttccgacggccatcatggctcctttctgtccatcggggcctcgagccgaccgagagcacaacccacgatagtaggctatacagatggcatcgtctgcggagaaaaacccggctgcataggccgcagcaatctccccggaggagtggccaactaccgaatccaaggtgacaccagcaccacgcagcagctgcactaggataatttgcaccgccgtgcacattggctgggagatctcggcctccttgatgcgcgacgccaacgcatcggtcataaactccttcaacaaagtccatctcgggcggtcgttgcttggaagacgttggagagcaagatccaagccctgcacaatctctcggaccttggccgacttcagtaactcgcgtcccatcgtggcccactgggcaccttggcctgtgaagactccgagtactcgagggttctccgtttgagactggtggtgtctcacagcgaggggggctttagcgtctgtttcctcaaggcgggcttgaatgttggccagtaggcgttctgtcgttgcaccagcgacaatcgtggagaaagcgagacgagatctgcgcgagtacagcgtccaggaaacatctcggatattcaccgcggggttttcctggagatattccgcgaacgatgtcaaatttcgggtgagagaggcctcagaagtggcagagaggatgaatggcgtgaagttgacctgatctcgatcccgcgggacgacaggacgctcatatgcctccaagattgcatgcgcattggttcctccaaagccgaaactgtttacactcgcccggcgcggtacacccgacggcagtactggccagggcttcgccgttgtagttatctccaggttggtgtaaaagggttcgatcttggggttgagttgattgaaaagaagattcgggggaatagtgcgattttgaagagctaatgatgccttcaacacaccggctagacctgccgttccttctgtgtggccgaccactgtcttgatagaaccgacgtagagtcgatcattttcttctcctcttgcaggaaaaaaagcattgctaatggcggctgcctccagggggtcgcccgtcggtgtccccgttcctgataatgttcattagccgggatgattcgacagcttatccgtatccttaagagcaaaacttaccatgcgcttcaaagaattggcagcggtcttctttcttttggggatctagtcccacgttggcgtaagtggcacggatcaatgctgtctgtgccgtagagctgggcatagtaatgccattggtgcgaccatcttggttcacgcccgtctccttaataagacactcaatgtgatcgccatcttccaaagcagcactcaaggttttgagcactacaacggcgacaccttctccacgagcatatccatccgccttggcatcccacatacgacttcttccggttggggaaagcatttgaagtttactctccgcaatatacggctctggcactagacagaggtttgacccagcagctacagcaaccctagagcggccggcacgaagtgtttgcacagcttcatggaccgctaccagactagacgaacatgccgtgtcaatcgtcatagacggcccatgccagtcaaagaaataagagatccggttcgagatgatgcttcgagcggttccggtggaagtgtacatggggaaggattcaggatcccggccgatcatatcggcatagtccccccacatcaacccgacatagactgctgtttctgaaccccggaggtcctccagccgcaaaccagcggagtcaaccgattcatagactgtctcgaggagtaggcgatgctgagggtcaatacaattggcttcggcaggcttgattccaaaaaattgcgcgtcaaaaacacggtagtcctcctccagtaggtaggaatggcgaacattgctggtgccatgatgaagattgtctgggtggtagaagccatcaggattgaaacggttgggtggaatttcggtctgtaggtcttttggctcccgtagcagctcccagagctttgacggcgaattgctctgcccagggaatctgcagccactgccaacgatggctatcggctcaggaaggctgcacagtggtggcatggtctcgcaagggcagtgcagtgatgcgggatgtttgagaactggcgatgataaccgtccgacaatgatcttgagaggttttccattattactcctttcatggtgggttttgttgactctatcccagagctatccggcatgtgctcggaggatgtattcggagtgggcccccgagtagtcggtcatttggcgtcggaggtcgcgttaggctgggagttgattcgctaggtggtcgacgatgtggggctaaccgatatacggagtactccgtacggagtagtgtatgcttgaattctcagtccgtatatagtcccaaagaccagagaacactaatctatagctgccatttcgatcaaagcaagaaggggtcgagcaactcccagtttttgtgtatgaacgcatatcaatcaagcccaatggatggcagtatacaacataggaacctagttcaaggggcaaagtagatggaatggaatagcttcaatattacccgcgaccttcgtacacgggcgatttgaacggtcggtataacttcaatgctggatatggtcaaggcctaaaaagtaccgtttgggggtgggaatagcttgaaattcatggatgggtggtattgtgcggtatcgaaggcggtctaaaattggtgagctagtcccaattaagctataaaaccattaaaatctgacatccaaatctcgatataacgacatttgtatgaggagaagagtgaattaacgaactgtgtaataagaagggaaattcgttataggcttttactgtatactgaagagggatattcacgatggacaatctggcctagcagacaagacgagagcgacacaacaacaccaactatccaatgagatcagctagcacatacagaccgtatgtagtagacatccttctatcctaattcaactacatcctgtgaaccccttttcattctgtgtgtggtgcataatctatcttctctccgctgggattttatctgacatgagagctccaagattttctctctgtctgaaaagcaaggccaatagttgatgattccgggtttccccactgcgataactaatttaaacaagaaactgaccgttacaaatatgacatgtttttactttatttcctccattgaaattgtctttcctaaccagtgaaaaaaaactcatggtccaaagacaagcgcagaggtctcaatactccagcgatctggggcgttcggcggcgtccgaggatccttgaaagcgacatggaccgcgcgccctcccttgaccccactgcctggtttcgatccatacgagtcgaagatctgtaacatgatcgcctcgtcagcccctactccggagagatagtaccacttctgatggtctcgatagatgggagcgccaaaatcttccgagaaatccttgagatgggagaccatggtgacaatgtcttcgtccttgacggtggcactcgatgcaatcgcgagcggacaggtgtagacggtgccgtttaggggctgccagaagtgtatcacacggtagcggcccagcagcagcttttcggcctcttcctcgtccaggtgatatctcacgcgatcgaccaccgcatcccccgtatggtccagatgggcaatcaatgcgggcggattataaggcacggggaagttcttcgtgtggcggatcccatggcggaagatgtgcaccttggtggcaccggggacgttggccagaatctgctgttctactagtggatagtagttcttccggatgtcctcctcgttgtcgaaattggtcttggagatggggacgccctgaacaatatggatggaatcgtggtcgagattgacagaggactccttgccgcgcaggtcttgaacagtcaccatgctcggttcgccgcgaatgttggtataagggactccctctggagggggacacttgatgtacatataaggtgtttcatcgggagggaactgccggctaaataaaagcggagtggtgatgtctcctcgagggggtggtggtagagcaccttgattctgcgcggagactgggggtgtcttagtggtagtcatactatggaccgttgcgtctttccaaagatcgttgccagtaccggaagccttgaatagatctgcggggagtgtctggtgagaaatatatggagtatattttccaggatcggctctgctactgctactccacaagcactatttccagcaaacttcctgaactcgtcggagtcggaatggagtcggacagtcggggttgatggccgatctgaaatcatggctgattttctccctcccagttgaatagccagtctaacaattagttagaacgaattttgcaatatctaccgatgactataccatagattagtatactattatgactatcctattaacatattatatagtaacactatcaattattatggaaaaagaacgggggaataatgtatgtatattcacggctaaagatcggttacttcaactaagtcttcagtggctctgctagttacaatgtttcgcttagaaatcttcagccacacgttcggctgtttggtgatatcgtcgaattccgataccagtggcatcttccagtccgcattcgcgatttctaagttgtagcgcattaccattgcggccaccattccaatcatctgcttctcggcaaatacccgccccggacagtaggttgtaccacctccgaacggcttcgtcgtccgggcatggctttcgccttctccgcccaacgacttctccaagaaccggcgcgcgtggaaggactcggcatccgggtgcagggcctcattgaagtgcatgagaccacatgggatgttgataaccccgcctttctgcacgaaccatttcttcttgccggtgaactgggtatcggcgacgacctcacgcaccgtcagtgagttgttgtgcatgcggagggtttcgtgccagatggagcgcagcagcggcatttttgtcggcaggatctccagcagttccgcagggctgcggtcggaagaatattgcgcgtcggcgagttccttgcggacctcgtcggccaggcccggctcagccagaatatggaggagggcgagataccccgtgggcatagagttgaggagcgaggcaaacatggtccgcagcatatcggcgccttggcactgaggactcatcccggactgggtcaggtagaccgtccgctcgtagagatactgcgagacgtccttgcgtgtttcgatattctccactaggtcggcgtaggtgttgatgatgcggtcccgagcctcgtaggcgtcgcggtagaggaaccgcggcgcgcggaagagcaagccccagaagccgtcgcgcaccatggtagtcaagtcgtccagcaggcccggatgtttttgcaaggtggttgcaccgtacagaacctgcacagtggccttgccctggacgtcgaccacggtctttagaccgggccgcgtgatggtcttcttgggcgctgcgtcgatttcggcgtccaggttccgaagctgctcctcgatccgctgcaaatactgcatcgcgataatgtcgttcttgtccgagagcagccactctaggtccatgcgatgccattcaggcttaatattccacatctggtcggcatccgccgctttgaatccccagatggagatgtagataaaccgaacaaagccgcggatgcttaacgtcttgccgttcttatgaattcccgcaatgtccaccgggtcgctgaatatatagtgtctccgaccccccataggtacactaaaagcttggccttcgaccttgcgactaaagcaatgttgtaagtgggtgttcagcggattggtatctccaacgaagtcatgacaatcgacttacttggcccagcggaagaattcccgcttactttttgcaaaccgaaacgcatgcccaaagaatggcatccagtgcggtatcacttctggctcattgggcagttgctttggcgtgaaagctagcttactgagaatgagaagggcgaccacaccggccgcggccagcacagtagggctgagcatggtgaatgaatttgtataaactttggtttctttttttcgtcgattaaaatatgctgccaatcgtgctattattgttttagggtcggaagagagggcaggattcggacacacacttgctcactctcggaggggatatccgaacatctctccgacaccgatgctgtctgtacatatcaccggacgagaaagacagtcaatgaacaaaggaaaggaaagaattgcaacgacggtggacaggcacaatgctgtcccaatttcgtattaatggcttgagggatggtttatatatggagataacgtcctggactacactcggactgctgttggcatccgtaagtatcataatccggttccatagaagcagtggggggtatgatagctgaaagttagagcggcagataattttcgcgttcaacgtggtccgcactgtctatcgactctggtttcatcctctgtcccggtatccagggcccaagttggccgcggcaactcatctgtggtatgcctaccattggatgggaggaagatatccgttcagtattgaagaggctcaccagaaatatggtctggctcctcggattccatcttctaggttgctgaagcagactgactgactgatcattctaggagacgttgttcggatcgctccaaatgagctgtcattcagcacggcacagagtttccaaggtccgatcaaccaacaaggaaatagataatcgagcaatggacttactgacaggagtgaatatcagatatatatggtcatgccacgtcaaaggaccacaacacattcatcaaaggcaccttctacgagcacccccaaccagaaccgggcatcgtggcggagcgtgaccccgaaaagcaccgggaaacccgcaagctattgtcacatggattcagtgcacgggctcttaagacacaggagtccatcatccatgattatacaaacctctttgtatctcagctgaagaagcacggcaccgaaaatgctttgaacatgcgggaagtaagaggaacccccgatttcttgcgctctaccatttcagacagggtctaatcatggatagtggttcaattatttgagttttgatatcattggcgaacttgccttcgcggaaccttttggagctgtcaagtctggtgaggagcagaaatatattcctcttttgcctacctacaatgccaactaacgccactagccaaatcgcatttctggattgataccatccatgatgcaggcatcctggtttgtttgtttgagattgggcgtcgccttccgcttctatggcccgttcttctgttcgctctgccggccaatatcaaaaagaaattcgacctgttcctcgaatactcgcgggatctggtccgtgctcgggtcgcccgcaaagatacggtaacgcgggaggatttctttgctcggctgctggcggacaaatcggagaataaatctgaagagtggttgatggcacaggccaatgtgctagtcattgccggctcggacacgactgccacggccctggccaccatcacgtactatctggctgcgaaccaagacaaactgtggcatctccagcaggagattcgccgcacctttgaagattcgtcctccattaccagcgactcacttcagggtctgccgtatctcaatgctatcatcgaagaaggactgcgcatctgcccgccgacctcctttgggctaccccggattagccccggtgcattggtagacgggcatatggtacccgccggtgtaagttccatctccattccagatctttatatgcgagggattgttctaaccagccgccaaccagacaacggtgtcgactgcgtcctggaccaccgcccaccgcgaggactacttccgcaatgcacgggactttcatccggaacgctggctcgctaccacgcagccactagcagatgtccgattcaaggaagataaccagacggcgtcgcggccattttcgctgggggcacgaggctgtctcggcgtaaacttggcctacatggaaacccgaatgacgctggccaagctagcatggcattttgatatggacttggtgaatcaatccagcctggattgggagagagacttgagatttgaagggttttggaaattgcccacacccgaggtgcgattcatcccagtggagaggtgagaagcgtctagtttatacaagagcggtgtcgaaagcggtatagattaaggcaccctaaggcatcctcagacatattaaggcatcaaccctcccaaataattcaaattgacccctgagcgctatacaccttcgcataggatggcgactagacagtagttttgaagatcatatatagaacttgtactaggtatagatatgccttgctcatctacatactcacatcccatctccccaaaacttttgctcggaattgatagtaccactcgcagacgatcacatacagtttcggcaccgtcaatgactcgacatccacatgttcaatgaaaaaaacgccctcgtacggctcctcgccgtcctctccccctttgacccgcccaacatacgcactgcctcccgccccgccaccaaggtcgaatgcaaactcctggttacgatactccaaagtgaacgaccacttcttccccactgacggcgagatcagctcgatctcgtaccctaccggatcatgcatacttcccccgtccctcggggctggagcagaccggtagagaatgtggttgtccgtctcggagaccgaattgcgttgcgcagaaaatacattgaccccgtgcttggtcagaaagggcgacggatacgagacgccatttaaccgggaggttggctgccaaaagctcagagagtatggcccagctgtgagtcggacggcttcccattttgtcaggatttctagccatccttttcccgaccaccagcggtcatggccccccaagccggtccatcggaacgcacttccctgaatagtcaggtcaacttcgatcccgccggctggtatgggttcgccccagtggagcattggcgcattccaggtcgatgcgaccttgtccgaaacgagtgcgccattcggatacctggacggggtggtggagtgaatagcaaaggagccggttacttccttagtgtggatgtggactctggcgtgcttggaatcccgcgtcgcctggaagacgtaatactcgtctatggcgctggcccagatcccgaccacctggttctcacagacatgcacgacggaccgggcgaggtaatcgaccgtggagaaggtggtcccgttgtcccagaccacgtcgagcgacactcgaaagttgccggggccaaggaatgcataagatgcatcacggtagatgccaagcagcagcccgctgcgaccggatgccgacgtcccatcaaaggcccattgctcaccggcggtccggttgagagcggagaattttggtgcatcgaacgggtccaatggggaggtggataagaggatggacggattagccgtctcgaatgccgtcagatggctggtttgacatgtagtgggcagatcaagctgttgttcgatcgtttggatatatttcccctcatcgccgacgtttttgaggtcgaattcccgtgccagtaaaaaggcaagaagaagaacgggcaacgtgatggacagaaattccaacctgattctcgccatcctgatggtaatgactatgattctcaatggccggtcaacaggcaatacaaatcataatatcgttgttgacgcccaggtgaggtctagattggtggttttcgctgagccgaatcctcgccgaacgccctcccgaggccgacaatccgagtccgaccttgcgcagatgaacacaaagacgaatgtctacatgtattattatggtaattgtcatgtctgtcatttctcctgatggagagattccgagagtgagagttcgacgttccggtctattccagacacactgcaacaatgactcgtcttcaccaacaccgtctgccgaccggattctcgccagaatgggtctccttgccagcccatcagacggtcatagcacagggcgatcaagggatacccgtcatctgtgatgatgccccaatccctactccagaagcacacatggtgctggtgagaacgggcgcggtgtccatcaacccgtgcgactggaagatgtcatctcgatttcccagtcctggcgctcgcattggctgtgatttttctggagtcgtgctatccatcggccccgacgcagccaagctaaggcccgatcttcaggtgggtgatcgtgtttgtggaggtgtgcatggttccaacccgatcgatctgccatccggtacctttgccgagtacatcgtcgcccatgccgatctactcttaaagcttcctgaacggatctccttcgcgcagggagcggtactcggtgggagtgtctttgcgacgctctggatagcattttatgactccctggggctcacgggcactccggacgcgccgattgaaggcgacgtaccgcccctgctagtgtatggaggtagcacctccaccggtacagccgccttgcagcttcttcgcgcgtatgtatccattccatggggggaagccacaggtttcgacgcgatggactgaccttccgatccagatccggatacaaacccatcacgacatgttccccgcacaactatgccttggtcaaggagtacggcgcagaagaatcgtttgattatcattccgagacctgtgctgtggatatcaaagcctacacaaaaggccgactgcgtcatgttctcgacatcatcacggatgtgccctcgcagctgatctgctacgagacctttggccgcgtcggaggaaaatacacctgcttggagaagccctccgaagagctccatctgcggccgacggtgaaaaaagaaatgattgtaggattggctgctagtggcaaagaaatcgcactagcggatggctacgaacgaccggcgaatcctcgcctccgagccgaaagtgctcatttcttccaatccgtccaacgtctgttggatcaaggacgcttcaagccccatcctgtccggcttctgccaggtcgatttgcgggtattctcgaggggctagaaattctccggtccaaaaagacatccggggaaaagttggtcgtgctcatcaacgattcttatacttaggttggaatatcatcgcaatatatattcttattattatagaaaatttctatgccccacttccgcttataaatccgcaaaatcaaaattcccaagtgttccccagcttgaggttgatcgctctcacaatttgagcgagggactttttcatgtttcccacatcaccaccaccgcccgcctcgggcacatctaacacaatatcaaatagtctccgcgtaaggccgccgtgcatatcgagccggatcgcacacatacactcatcaatttgtctaataagatgcgcgctcgcctggagcaggatccggatctgaagatcccgtcgttgcgcaacatccaacccgtcgatgtggatgctgggcagcgtgggaaggaagttggattccaccatggtggctgtctccgcaatagagtcccgtatcagcgagaagacttcccggtagacgcgcagaaggctgatataacaggtcagcatgagcatggtcaggatcggatccacggtctcggactcgtctgaagaacgcttggacggatgactagacgcggtgggagaagttggagcaggagccggggagccgtcactcgtgttacgcgaactcggcgtcggcgcatgccgatccgtcagggaggccggcgagaggcctcggttagtttctcgtgaaggttggtctgtcccacttcggctgcggggtcgcgagagtttaaactctcggagggtgcggagcagctcttcggagctgttgagcatatgttcaatcagatactggtgtgatccggtctcgctagtattcatggtcgtctgctggcgagtggtagcgaagagaagtgtgccggccacttttccagagtcaagaagagtcaagtcttggagaagacccgcactgatatccgacagtctttcgttccagttctcgttgggctttggggcacagtttatccggccctggttgttggatttacgccggcgcgaacagggtagagagtgataggcgcttactggggggactgcctcctcgcgcaatggcagaggggcgggatcatggctgtccagtccgagagtcgtcgtcgggttgtttctttcttcctgctcgtcattgttctgcgcccaggaagcgtccgcgtcgataaaggcctgggtgaagtctagtaaatccgagcctggaaagcccgagatggcggcatccatcgagatatcgccgtacgtctggtattcggggtcggagattggacgctcggggctggtatctgtgccgagatggggtagctgggagtccgagtcgaggattaagatagggcttggtgatactgtggccattcgatggtcggggccaaagacggatgaactcatgcggttgggcctgttcgaaggtagcgaggcgttggccattgagggtctcgctttggtgatgcggtgggaaaatgttgtcacacagcgggcgccgaccttgaggcaccgacggcaagagtcctcgatgctcgaattgggtgagagacgctcacaacgcagcttctgacctcgacagcggtcacaagcagatcgacgaggctgttcgacttgtggggattcgtggcgggtgctatccatactggacagtctatcaacgatattctgcgtgccagcaaatgtctccctagacgtatctttatttctcgttttcttcagtactttttccctcttttacaactttctctttactccactttaccacggttactgttcgccgcccactatcagcagggcgatttagggtcacctatcggatcgggcttcatgaacactctatgccaaaagaagtatatgaactagctatcttccaggtctagttgcgcgtgagaaaataggccgtgcatctcaaagagccacgctagcatacttactcgtagcgaaatttaacatgctagccagtcacattatactatgaatttctggtgcctccagccccacttaaactacccctcaatgaagctgagacataagctacagatccctataggcgaataagataatagactatagcgggatgcagaggtctactaaaagaacgagtctcatgcggccggaatagcctatggctccgcttcaccgggttagccgcaataccgagcttacttacattcactagtccatacaaaatgagtcataagaccctgtctaactcttagttatccgtgtctctatgttatttgccagtcgttacgagagcggaaggtgtattcgaacggagtaatcagtacaatgagaagaaaagaaaagaaaagaaagaaaaactagcggatggtctcgattgcatgggttttaactttgtgggcgttcttaccaagccatgcagatgagtgcgccagtacggaggatgggaggaatggttccctccaagactgtccagatcgtcatctatcgttatcatttaacaattcaacccgctgcaactgacccactatatataactcgggataatcgtacataccacgtcaacgcagatgtgatagagcaaatcacgttctctattacttagatcagattcggccccatggggcaggtcccactttgttctggatgtcgcccggtatggggccgcgggccggcccctaatattctgccgggaagattggtcagtcaaccattaggaactaattcatatgctgttccgcggccgtaactaactaatgagtatacaacaattttcattttctctaatcatttacttttctacagccgcatttagttcaatttctagcgactttataaatttcaaactaaatgtaaccacaagctgacaggcaagcacggagtaagcaagtacagtggtgttccatgagtatttgaccttgggtacttcggccttgggcccacttcgtaggcccacttttaatattgcccagcagaaacctcggaaattcaatccaatttaatagctggtatgccaaccttcatatttgttggacatggtggtcacctgaacatcagccctgttcgggattgacaaccccatttcggggtttgggtcccgcccacgggtctagaaagggtacttcaagaaatacatacaggatatctcgaccacatcattcaattttaggaaggtaaactaatatcgcgaagttaatctaaaggcagttgggccgtacattcggccgagttactaaagaaggaagtaagcaagtcagtaagcccgggctctaatgaggtacaacaacccaaaaggtttgttgaatgggagaaaagggccaggttagtagactacctacattaggtcctatattttgtgttttttttttaatcgtgaactctgcagttttccgtttatcggatttgtggctttcaccgaatttgaaagaggtgtctgattgaaatatataccgcctcaatgggtggtgattgtaattttatatataactcaattgtgacgatccggtcaacaaaggaaagagcaggacttgatcacagctgctatgtatggaaggaatctttccttcccaaatagaagcaagcgtaagcgattcagatgtccatttgcatgggacgtccgcataagactatacaacaggctgtcctttctctgctctgtactcaacatctcgtctgaatgcaccttacatctctgtaaagtctggcctgtgacatcaatgacaaaacccgcaattttaataagatgcttgtaatagaatatacttcgtttcgggtaacttccgaaccacggagtaatcaccgcctacaggctactccgaacatcccgtgtgtaacattacagcctcttcttctctaacaattgtcattcaattgcacgaacagcccatcgtccttatgacaagtacggagtacataacgcctgatcgccacttattaccgccttcttaaggctaaagttagttacctagttacaatttagtcattctcattcatatttcaccacatgttggggtgggttaaatgaagcctttggcgccataaatttagggacttgttgcatgcctagatttctagtatcgccttcctgatcgggtacttctggtttacatagtatgaattttgattaaaaaaattctatattctacctgattcctataggattcaaccccttggttggtgaaacagttgatacaagatatgacaggagtgacttatttttgttaagggtttacacacaaactgtaggtacctgctgtcttgctactatcacatgcagtttattactgtcagaatctaggataaatactgtcatttttcatccctgatacagttaggtcacatgactgaccaggctggtttttctgcagaaaaaccaactcagatggtttttcgcccgaaaaatatcctttcattttgttttgtttgttttgattactaagttgtccatcagattgtcatgttttaggactattgtcagttttagagagttagagaatttattaagatttttctgccacaaaatacactcgccttaccaccgtttttccgtcaaatacaaaagggtgtacagattaagacgcggcgaggagagcggtaggcagaagcaagtgaggcaggtgctcaacccaattgggaaggcggtactgaaaattcacgcaatgcgagcaacaattccctaattatcatttttccagatggtttactagctctgtctgtcatatatgaacatgaaggaacgccgttgcaggccctcctgataggcggggaggaggggaaattaaaatcgaacaggatacattctacactcccacgaggaaggctcttcccaatcgctgcacatcagctctcaacaacccttgacggtgacattccgccccaaacaagtcttcaatctcagaccgtaaatcgagcatcaagaccttgttgtctaacatccgctccagacagcgaagcactaagcttttgaccacatcaatgattgtggtgggcaaggcatcggtgtcatactcatatcgaattcttaacgcaatcatcggcctgccattcgaagagacatgagaacttcgagccttctgtggaaatttgaactggctttacccccttgacaggaaagggattttcgacgttaccatgtgtccgttggtcgtggaaagtgaccacgcaatcgaataaaggttgttgttgtctttgcctaagaatttgatggcttgggaatggtagtcctaggtgattcagcagcgaagaccagggaatggcatttgccagcgcagactgagatgacgatcgaacttcttcaagagcgttctcagttgtagaatccgctttttctagcagtattctaactggcaaaggctgaagaaacaagccgaccacttccatatcccttgtgttagatcggttcatgtatggagacccgaggagtacatcatgtcggccacagatagtctgaagaacgatacccactactgccaagccaaattgatgcagtgtgattcctttgagggaagaggtagcgagaaggcttttgtataatggaggcggaatcgtctggaacacggattctccgtggtaggatctgcacgatggatcctcagttggagaatctggagcccgaccgtctgtgataggaaggcccttcagataggtactccaaaaggacaatctatcactgccaacgggttggttccagactgtgcagtcgaagtactcgcgcctgacgggctccaattttcgaccgtagtatacagcagcagtttcgcgcaagatcacattgaatgaagtcaagtcacacacaacatgcgaggcgcaaatgacgaactgattttgggaaaccacggcgcggatcgggctttctttgtcaagattgaagggagtgttgatataatgtccgacgtcaactttccgtacgacaggcacgatgattgactcgcctgtgattgaacgaagcgtcttatccccccggcttgtaaacctggaacgcaaaattcgatggcgattaaacactatctggaatgcagaagccagcttttggatgtcaacatcagtcgagagctccgcaaagtaaggtacattgaagctcgttgttgtctctgaatgttggtaacgatgtatccactcgatctctgtcgatgaaggagtttctagaccaagtggctggacttgagcttctggtgatgccagtggtgtgccatgtacctgtgactcgccctgagtctgaataagacgggctagatctcggagcgttgatgcggagataatatctttgacggtaattgggatgttgaaaaggctcttgatgcgagcagctagagcaagttggaggagagaatgaccaccgaggacggcaaaatcatctgcgcttgatatttgcctcttggagtccaacgtcaacaattgtctccagatgcctgcaagtgtctcttctagagaattcaggggctgacttgacttgggaaccagtttgacgtgattgttcgagacaagacccttgatatcaaatttaccatttttggttaggggcagctttgtcatggagtaaacgcttttcggggccgaatgaggtggcagtgccacggccagctggcgtctcagtagctctgtatcgatttctggctcaacccagagcacaacagcgccgttctctgtgactgcgacggctttggagaccgagcacatcgtccgataaaccactgctgggatgtcgtccaagttaatacggtatcctcgaagtttgacctgccgatcatctctactacagcaatgcaggttgccatgctcatccaaaaagccaatgtccccggagcgatacatcatttcttggccaaagccctcgcaaaatggatcaggtacaatttcttctgtcgtcttcttttcaattccaagatacccgcgggatatctgaaccccggcgatatatatttcaccgatcgtcagcataggttgattattcaaattgatcgatagaatgggccataatacctctgtgggcccataaatattataaagctctctgtccgaagcccatcgttcgaccaacgcatctggcacaggttctccgccgaagtgaatctttgtgatagtcagaaaattgaaatatactataaagttatgatgtgcaaacggataccataccgatttcaagttaggatagtctcgtgggtccagttctccagccagggaaggggtgagtgttgctacatccacatctgacaggtgagagaatttatcgtcctttcctcggggtagtaccaaagtacccccagaacagacggtcgagagaatctcgtggatacagccatcgaatcctggagaaagcatctgaccaattcgtgtgctgggacggcttgtgggtcgagcggacacggaggaatatagggcgacaacgccccgatgcctacacagcactcctatgccaagtcaataattccacgctatgttaaatattcccgaagacgcacctttgggctggccagtggacccagaagtgaaacaaagataagccgtagagctaggctgtggtaacctaggttggaaatccgctggcttgatgtttttgttcagaatatggtctatcgctagtgtgagtggaccatttggccctgtcttttccatttgcgaagtattgggaagcagtagaacctgggcaccgctgcgttcaaggagctgagcacgatattcctcagggtacgatgcgtccaccggacaataaaccgtgttggcttgcattgcggcgagcattccgacaatccagttgctggatcggtctgccaaaactgcaatgactgcaccagcggggacgagcaaagtgataacgcttgtaattttgtccacacgttcagccaattgagtatatgtcaaagccttctctcctgcttgaatggagatttctgaagcattgtgccacgttgaatattggaacagactgctgatagtttgacccgaattgcatgtaaagctggaagtcgagttactgtttccggctgtcaatatcttctcgcgcatgtgcgcggggaattccaggctgagacactgctgcacagagaaccggctgcgaatcagggagtgtaagatgctatcatagatatctgccatgtcttgcacctgagttagtgagaacatatcggtcctatagaagaggcgaataccctcatctgggtcgatcactaggttgagagggatgtctgcagtattttggaatgacggatcttggaggcactttacggctgttgttcctctcctcagcccaccatcttgaacagcaactgtggtggagaatgctggtatgtttgatggaacttccgaaacgtgtatgctagccaggccttggatttcacgatgaatctgctgcaaaaacctttcagtagatgaggacctgtcaacccgaacaaggacaggcaacgtttgaatcaacgggcctatcatggtgtctgcccatgagaaaggaagattgcggcctgagaagacacttccgtacacgattgtgtccgaattggtgtaggttgtgagcagcagtatccatgccgcattaactatggccgccggggtgacattcacagcgcaggcgtattctacgacttttgcccgatctacactctcatatacagaaatctgagcgtggcctggttgacgggggctaagcaaactagcgtttggagatgctatgtcgccgcacgcatcaggtatgagtggctcacgatcactccaatgttcttggatctctgtacgtgtttcacgacgtagctgctccatatcccttgctgcgatagtgaacgggagagagctctcaaagggtctgccttcaagagcagcatccactttctggaaaatcaaggaggccgaaaatccgtcgactaaggcatgatgtacggtccacattactgtgctttggcctctgttgagcccactaccttcgtagtggaaaacagtggaaaaccgcaaaattactgcccaggtcggcacggctgattaattcctgtaacgccacgtcgacatcatgttgagatttcaccgttgtttcttcccaagcaaacgaagcttgtggctgcacaatctgcatgggttcctctgttgaccagctgaaagacgtacgaaacatgggctcaactgagacgacagcctcccatgcctttttgacccggtggatatcagctgtagcataatgagaaagctgttgcacatagttcatctggtgattgtccatggtagctaagaggagggccttttgaaggggtgtgatctttgatttcttccggcactgtagactggtctcttgcgtggagacatgagatctctgcccgtcacaccgacctatcaacgcttggatagatggctccaagaggatgtcgcgcacgggaactgtaaacccgtactggctctcagaggatccaatatctgctacctcgacactgagtgaagcagctttatctccagtagcggatattttaattgatcaaattgacgtcaatcaatcagcaatctgctacttgagataaagctgtcataacagcttcactcagtgtcgaggtagcagatatcggatcctctattgttgagccaatggattccttgatgatagctttcaatgccttgaaatcagtcttgccgttcatcatcggaagagattccaggacgaggatgtggtccgggaccatgtagactggggcattcatcttccacctggctagtagactagttgtgtcgatggtacctgaaccaacaatggagactaggtgaccgttcaagaggagtgagaacgaaaagcttagacgattgttaagctgcagaaccttggcatcaacatcctgtgcgaggttgacgagaaatccacggattggacccccattattaaacatacggtttactccgacaatggcttgatctcgtagagaatctatccttcttccattctctctcttcgctccaagagcaatgtcataattggcatcgaaatttggcttaacagttgggtactatttcaatcacagacgtgagcatcatcaaagcatatcagatttttccctctggagggcctctccatccagaacgtcttaaccaatcttcgaaagaactagctcgtaggtggagttcctcccaggaagagtcttcggctggatcaagagccccgtagcaaatcttgtcctcgggcgctatcgagatccattccatcatttggcgaatatcctccttgaatccaactcctaccgctctggacgccaaatcagcccattcatccatcgagattggggaataaatcgctggctggccagtgacgcgcgtaaaggtggatgcaaattcgcccatccgtaatttcggactgcaaacgacgtaatttttgttctttgttttcgcaatgcctaaagcgaatacctctaagagaaactcttagccttgcacttctcattggccataagtaacttctctccagtatccctttgcaaggcgtgggatatcccaccaagtctcccttggtagaagagactacaaaagattcgatatcacaacttacctgcagcaaaaatacccatatcatgtacaggatcaacccactgaactaattttgtaggcggaatcgggggacaaaaacgaaccaccccatttgctacactagttagaaatattttccacgggaaactctctatcagaactgaccttctcttcgacagtactgcggacgatccaggttggtgaagaagagaccttcgagaatggttggttaaaatccacaggaacgcctggcgtcagcagggagactaaccaggaagaaggcaagtgaccgcaggcaggtcttgctttgcccactgctcaatgataaacttatgatccatgtggaaaagtttgtcaaagcgaccagaagtcgctcgtctcatgtctggcaagctactaaaaacaaagtgctgaatgcggcaaatcttcgcggcggaaatgatattcttcccactttcgagctccagctttaggtcatcctcgttttcgaccgttcttgaattaatctcgttcgtcaccgcaaacacaccgtaagccccagagaaagcgttctgaagactttctatatcgaaaatatctgcggaagtaaggctaagacggtgatcggaggtttgaaaatcattcaaaagacattgagctgaaacggaattgacatccctagtgactgcgcggacatgccacaattctcgcgaatcgtcacttaaaagcgaactcactacgcctttgccttggtgtcctgtagacccaagcacgacgatgatgcggttctgcgtgttggtcatttcgattcaacaggaaagtaagcaaccttgcgtggccgggaggggagatagttctgaatgagaaggaaattaatgagatgaacaggcggctccaggagaattaatatacctagctcttttcccagtttcactctcgatacattacaaattcagggctggctgacttcgtgagcggatgaaccatctttccgtaccggagacttatgcttatgatatccaacgtcagggtgggtatgccccacaaaacggaagttatcagaattaggtatcttttgtatggcccactcatataaaaggtacatatacctaacagacccatacctagaacagctatagtgaaacgaggatgaaacaggatgaccaatcctacagaaaagtgcatgttgttataatattcataataaatagtggaactgcttcccttgtaccttaggaattcgtcttcgtctcccactgtgagccaagagactgctccaagcccttgaagtcgttcaccctgtgctttcctttcgtgggaacgttgacggggacatattccttatggaacaatatagcttcaacagcaatgggaaactcctcgtatgcagaggactggcaatcgtgctcaaggattcacgttggccgtggagtcttcatcaggtccgggttcttttttattgcgtcccaatctggttggtgccatgaatcgtggttctccttgccacctgtttggatcagagtggcttgttgatgcctgtccgaaaatattagtgaccttaaggatgtgtcggatgtatcaacctgatcttttccgcagcctgtaagccgaggggcacgctgttcttccctgcaagctctagagaaattgccaacgcagccgcattctcaatagcctgactagcaccttgtccagccataggaagataggggtgggcagcatctcctaccaagagaactcgccctgcgggagatagccatgtctcaaggggaggcctagtgaggagggggaaattgatcgccttcccgggcggtgtccgcttgattattggggcaatctggtcccagcaaggccagtccttgatctggtcaagcacatcctgaacattagccggagctgtccaggactcgcgagcattgcccttggggtccggatgggtaaagattcacatcacagccttgcccagcttcacagtgcacatggtgaactcgcaccccttgcccgcgaatgctaacgcctggtcagtttttcctgcaccagcaagcaaccagtttgcctcagggtctggggcaatctcgtcggcgtcgaaatatgcccggaatgctgcatattccgaactcacgggcgccggatccttgcccgtcacaaatcctagagctttgctatgcacaccatcgctggcgattacacaatcagccgacaccttctggtcgttgaccaccacgccggccctctagtctgtctcgaagtattctgagactcgcgcactgaactggacttcaatcccaagttctgcgtatgctgataaagaatattcgccaggtcacaccggttcaaaaagaacccatcgccctttcggaacccagatatcgcatttgtcacgatgaaattccccgcatagtcatatatatcgactgctcggacatggctgacctgggcctcgagctgtcggtgaatatgcccatttgtcccccatttggagacaacacgagccgcgttggttccaattccaatgcaatcaccttctttctgattagatgcttttttttaagttttccagattgatatatatcaggattgacataccttgagctcgtggtgaggaggccttttcgataattgtcacctaatgacctttgcgatgacattcaatggctgcagctaatcctccaattcataatccgacaacaataacgtttattccactggatcgaggctcagcaaccgcgtccaggccgcgtaccgatgacacagtcatgatgaagtttaatgagcttggaatattcgtggggtagaattagagggcggattttgaatgatttgaatgtgtaatctaagtccatcaaggcacgctaggaacatgcaagggttaacggcttgcatatactgtggtaagtagttacttgcactacgtagtgaacttcattccgattcccaacccgcttctatgtcgtaggcaggttaatcccgcggatatgataagtccacattcaccatagatgttggttgtaaagcatcacaccgccacttttacagtattcttattatggtagactcgtgacaaacggtagcaaactacaataaataaaacgtagcagaccaagtttccatgatgatgcgcaataattcaagctccgtagactgtgacatgtcctcgattcattcgagatgatcgcgataaggcagcatgactaccccctatagtaatgaaccttcggtaggtggctttcaggttgatccctcatttcctgcccagtctctctctcttccctgtacatgctctttaagtatgttatgatcgcgtgatatatactacgtatgagtcacgtggcaatgaccagcatcacgtgataagtattctacgtcaatcacgtgctttaggtattatcacgtaatatactcaaacaaacacaacgcccacgccaagcaaatgaacaaacaaaccgcggcgtagccagtaggccggctgcaggccatctaaggagacgacagtcgacctgacatagcatctcgacaattcttttggcaatgtcaaagtgacaagaatcttggccattgcgtagtttcaggtggtttcagacttgatgaactggcaggatggttgtctcgagggaattttaggatgattgttgaacaaagagagcacatggtgctttggaatcaaaccaaccttcaaacaaaaatactagacaaagggctagccacgcgaattagaaactcggttccaattcattcaaggtaaagtcggtcatgtagcgccataacaaagaggtcaagtccctgcctatcaagagccgcgatgtcaatccctcggcgtattctgggcgatgtaattagctcgagtttatctgcttggtacatcagcattatatcaggttatcttgaatgtgggggccatatagtatagccagtgagatagcaaggtggtggtgttcatgtgaagttgtaaaggcagaaagtcacctgccccgcttctactaatatccctcattagttgaccaagccatggatgattcaaagccagttgatcagatattcactaaagcactaccgaagattgaggtatgattgatgcctcgttcccctcttagatttttctgactcgatcacactacagctgcacgctcatctcagcgggagcatcagtcgccaatgcctgcatgaaatttggaaacgcaaaaaagagcacaatcccaatctaaatgtagaggatccgctggtactgatgcctccgggcaaggtcgattatacactggaaacgtaggtgtctgtgtccacaccgaacgatgctgcaaataattattttccatgctaaccaaggctcaggttcttctccacattctccaagttgacctaccaactctgcaacgacctagaaagcttggtatatgctactaattcggtcctggaggactttcttggagatggagtagtgtatcttgagctacgaaccataccaagagcatctcctggtatcactcgagagcaatacatcagctcagttctagctacaatcgagacattccaaagtaaaacacaacggatgtctgtgtttttaattctagccatcgatcgcggcagcatgacggcagcagaggcggatgagatcgtcaatcttgccatcgaaaacaagtcgcgcggggttgtgggggtggatatatgcggcaacccaaccaaaggcgatgtcagcatctacaaagaatcaatttcgaacgcaaaagccaacggtctgggaatcaccattcattttgctgagacagcagcttcggcttctgcgagcgagctatcaacccttctttcattccaacccgaccgattaggccatgtcatccatgtgcctgacgaggtcaagaaggagattgcgcggcgcaggctctgtctggaactgtgtatctcttgtaatgtccatgcaaagatgattaacgggggtttcttggatcaccatttcggttattggcgacacgaagactgccctatcgcactctgcgtaagttcttcccactgagatagagttctatttcctctctgactatctatttgcacagaccgacgatgtgggatttttctgtagccccgtctcgaacgagtacttgttggccgcacagcatttcggcttgagtcgtgctgatctcttggaaatgtgcatcaagtctgcaaatgcaatttttgctggcgagtaccacaaagggagaatccaaagtatgctggaaggattcgctactcggtttgactctgcatgagtggttggaactgtatcggcttgttggatgtcgcttttgttattaccagaaaaagatgtctattgattatacgtagaaaacccgtttccaaattcagccgatttttcctactgagaagaatatcgtggagccaactaaatcatgttattctcaacttcagctacgtatgttgaccagttgtggaagctatacccgattaggcatccgatctcagcctcaaatcgttcagcttccatcgctaacctcaattcgttgcccgcctcgtaccgcctccttttcttttcaccttggtgtcataacatttacttaattctttcggacattatactgtttgcagcgtggattcaatctgcctttgctatttaatcccctccgacccccagcatctccacctcgttttatcagctccagttgcaaattcaaaatatctcaacttttttcctcaaaacgtggacgctcctctcacatcactcaaagctttaacataatgacgacaaatggtgctctcccacagacactcaagtctatcactgccacgaaaatcaatgaactctccaagcaacgcgccttatttgatcggcgcaaagccagaatccttgaagttgccaacgaagccccagatctacgcacccgtgctcaggccttgctgtatggactcacacgcctgaaaggataccccaaggatttgcttgacgaacatgacctggatctagatgccgatccctcacctgaggaatcggaagataaagtcattatttggcgagtaggtcgtttgcagccgggagatcatacgagcatacatcgctttcttctccaaagtcgctacgatccttccatctccccggcagctatacaggatcgtgtcgatcaacttgaaaaggagttgcaatacctcgagaaaaagcatgagcacagtgcattttacagcaatttggttaccgagtggctgtcggacttggatggaagcatcatttccaaatccacgagctccggctcgagctccgacaacattgcgcgggcggaaatgcctgagcaacgcgcgacttgggagtccttgacttttactgctgcgacacatgtcaatgaagatgcaattcggtcctatcttgatgatcttttcacacaaaccaacctttctcgacaggcactcatggatctccgagcaagtatccagtcgtttgggacagaattatcctcaaagaataactggttcaatgtagaggaactcaagtgggtctctcgcgcacttctcaagtccgaccttcttagcgatgagaagacatccattctgaaagagttcatgcggaacaacgaggttgcccaggaagtggcagatgtgctcaacatgcgcatttcctcgcttgacagctggacctggagcggagccgcagatggtgtttctgttgagatgcgccgccagctgaatggtaaatatcgatttttcatggacgaagaccttcttgatgcccttctgctacagtaccttgggacaaagtgggctgtgaagctgcgaaatgtatttgagacattcctacactcgaacgcctggaagcccttaaatgaggatatcccagatgatcacaaggagatgcgaaagtacttccttggtcgagacgccaacttgggtgctgtcaatctcaacgagattcgaaggatgacatatgccgaccaatatttcatgagccaactacccacatcaaccgccgaaggcgctcgggagtatgatgacaccacgaattccagtccagaaaaccccatggataaaaagcactcccttttgcacctcctgatcacagaatccatcatccataagcgtcagcgcggggactttactgcaatccgatcggactttgagtggtttggcccttcaattccccatgccaccatgctcaccgtgctggagttctttggggtctctgagctgtggatcaagttctttgttgtgttcctagaggccccgctgaagtttgcccaagatggagccgagggctctgttcaaatccgcaagcgtggcgttccaatgagtcatacactgagtgattgcttcggagaatctgttctcttttgtatggactacgcagtcaatcaagctacagacggtgcctttctgtaccggctccatgatgacttctggttctggggggcagagaatacttgcgtcaaggcatggggggcaatggaccagttcactcaggtgatggggttgaagttcaatcaggagaagacgggaactgtgcagatgggcctgaataaaactccaaaagattcagctcttcccaccggtgatatccgctggggcttcctggttttggatgcggagaaagagagatttataatcgatcaaacccaggtcgaccaacacatcgaagagcttttacgacagctttcggcctgcaaaagtgtgttcgcttgggtccaggcatggaacagctacttcggccgcttctttaccaacaactttgcaaagccagccacttgctttggtcgggaccatatcgacatggccatttccaccctgagccgcatcgagcgcacactcttcaacaaaatcatagatgataaaagctcgtcgaatcaaatcagtggtgtcaccgactatctacgcactgtgatcgcagatcggttcgatatccatgatcttccagatggattcttctattatcctgttgaactcggcggcctgggtcttctcaatcccttcgtccgacttctcgccatgcgtgagaatatgaaacaaactccccagaagctattccacaaggcctcgctgatggaggagaaggaatacgagggggacaaagaagagttcaaaaggaacggtgctgatgttagcatcccattttcgagcaaatggggggtcgaatccacgtcattcatgtccctggaagactacacccggtatccagaaacatttagctcctcttttgtgcgcgtgtacaggcaactagccgaggttccggatgagatgagtgttgatccgacttggagcttggtaagggagcaaaagtgccttgatcaaaggtcctctgaaggttctataaatgctttctggaatacaatgacgccctattggaaatgggtggcggagttttaccacgaagggatggtccgtacttacggtagcctggatgctgtgaatcgccagtctatgcccctgggtgtcgtgaagacactacgagagggtaaattcagatggcagggttaatcgagaatccggtttattcagcagagcaaattcatttccgaatataggataaataaaaatcattcacttgctattctaactaaatattgacacatactagttaactagtagttacatcatgaaactagtttgttgcactcctctgttaaacggcaatgtcctgtagaagtgaagaataaaccacacctagagtaacaactcactaattatctcggactatgctcattaattatacttacatagatatacctaaacccagctgtacacattcatttccctgagtttctaccctccactcctggtgatatattgtattcacacccgcagtcgttcaccatcattatgatgtatataaggtttcccgcagtctgggtgctgcccggtttcaagatgtactttacttattgcgatacttgtggcgctctttctatcatcgccgaaatacctttcggcctggcaaccatggatgtagccctaatttacctctattggggaaagtaccttcaactacgatcggaactcgatgtcggctctcaagagggcttagtagctataacggtctatatatacagccatttgaatccagctctctgcttggtttatcttatttcttcatctatcttctctgacacttacatcattcagccctcaggtataaatcgaatccacttcaagtatccctcaactagccctcactatagagtacattcaatactcgattcaccccacgggaacaagaccagaaccaacccttcctcacaaatgaccaagggctatatacaacatcgcacgatggcatatgtgcaaatggacttcaactggctcgatattatttctggggacaacgggagcatagacccaaggtaagcatctatatctatatctcttccgatatacattaaaatgattcacaggaccctcaaagtccatcaggtagttacagcccaccaggacgaaacatttcggtccgaaaaacagccatctccccagccatctccccagtcatcgccccggtcctcctcctccctggacctacgagctctaggtccgttgaagctggaacatgaccctccaatcccgagactaatcagcaagtcatctctccgtcggctgcacaattgtctcaaccaacagggccaaaggcgaagattcatcgagttccgcgtcgaagaagaggacgcggtatcactagtcaggactccgactgacctggagtacgaagattccttcctcccgttctgtggagccttaacgccaccgtacgggagatcctccgaagacacctgtcattcttcatcaccgtcgtcttctcagcctgagcctcagtggttggctcttgtgattgcgcgagttgtatcaagcaaggcccgcaaatcatgtcgggccttgaagaagaagttttctcggtgattccaaggaaagaagattgttacatgatccaaggcagatcatggacccccatgcatattattgtctattatcgctggcgacaaatcaccttgtgccagtaagcaaaatcggggtacttttttgcctttcatccggaattaaatatatatttttcactttcaattatgaaaagatagaatgaagcatatatttgttaaacaagtgtcgttgaagtaagtgggagaagtgtaactagatgatcgaaatgtgtatctaagagcggtcggcccacctgcccctgttatctcggcagagttgcctcttccccataaagccaccgtgaacaactgcggccaggacatcaacaacacccatttccctcgaaccaattcttccacaacagccaacatggatcccttttctgcagagggcggtacgcattccagttctttctacagctccgatcaacgctaacccagcttccccgcagagctcctcaacatccacagcgccttccactcaggccaataccagaatgtgattgacttcgagaccgccgcgctctcccccgagaaccagctccccgctcaagtcctccgactccgcgcccagattgcccttggccaattcgaagaaagcctcgccgagccctccatcgaagaggacagccctgacctctccgccgtcagggccctggcactgcagtcctccggcaaaacagacgctgccctgcagctcgcacaagagctcgcagagaactaccccgaaaacaacacggtgcaggttcttgctgctactgtgctccaggcccagggacacagcgaggaggcgctggcgctgctgtccaagcaccagggtaacctcgaggcgtgagttaccccgttgcaagtaggccgcgaatataacggagcatgttggtctgacattctatttctcctagcgtctccctcattgtccagatccatctcgtacaaaaccggaccgatctcgcgctcaaggaggttcaggctgccaagcgctggggtcaggattcgctgctggtcaacgttgccgagtcgtgggttggcttgagagttgtatgttgatgataaattcataatcttctggttgatggttgatggtctatgagtgctgatttgtgtttctgtacagggcggcgacaagtaccagtctgctttctacgtcttcgaggagctcgcatccgcacccggtacctccgcaccgctatctatcgttggtcaggccatcgctgagatccacctgggtcgtcttcctgaggctgaggctgccctcaccgctgcccttgagacataccctaccgacgtggagttgattgccaatagcattgttttgaatgtgttggctggcaagcagaccgaggacctggagtcgtatgtcatcctatcggagaagaagatagtgaactcgatgctaacttttatctcgtctagccggctacagcaggtccagcccgcgcacccccttctcaccgatatccaggagaagagcgagtttttcgatactgcggcggcaaagttctctgctaaggtctcatcgtagaaatatttcaatgctgttccctatatttgttatgtttaatccgagtcaggggagcttatcctacttgtttatgagagacacgacctatctcaatattgcaactggtgtcatatttggatatctcatctgtaatttggtacaagagataggaacaatacaaatctgtttctatcacagccgagaagccaaccattctcgcaacgccgaatgagtcggagtctcctccttcatcatagtgaaaaacggcgcatcatgcgactcatcctgcccaatcacaaaggtaatgtctttgaactccgccttgaccttcttcgcaaactcccgaataggcgaaagcaaaagctcatcctcaccaacaagaatcaaaatcctctccgtcttagcactctcccaccaaccagggggtgcatcaaacggctggttccaattatcctccggcagaccggcacggtaagaaatagtccacctctccaaagcctcccgcggaataatatccttccacttattttcctctatcgacggccagtccgtactaaagtgtatccaaggcgagaacgcaaagacgcccgccaacggcaccgacagctccagcggcttgatttccgcgtgcgggtgggacaggtgcagcagcgtcgcagcggcaaggtttccgcccgctgagtccccgccgatgatcacgttggatggtgagcggcctgtctcgttgatgatgtagcgcagggcctcgacggcttgtcgcatctgggtcggatacgtcgactcaggggtgagcgagtaccgtgggaagaagacggctaggttgtcgcctgttttgtccaagtctttcagcatgtcgagccagaattcgaagtacgctgccatggcggggacggcgaaaccgccgcctgtttttagaagttagtattttggttgatatcatgcatttaagttatgattagactttttcctctgtggatgctaatttctccgagtgttacacggtggggatcatagacgcaccgtggtagtatataatgacgttcttggcgtctttgtttccgatccagtggccctcggtgttgtgtgggagtacgacagtctcgggtttgagaccgtgctttttcataacgccttcgtaggccgctggagttgaggggctgaggtacctgtgcaataatacaatgtcaatgtcgtgtccattctgatgtttgctttcttgcaacttgcagaagaattggagagagagaataacatactgcatctgacgatctgacctccgagtaaggagtttgcgaaccacagcggacacaacatagtgatcgtaacgcctagggctggctttaccccggaaaacaccagcaatggcagcatataccaagctgccgcaaagggacaggtacatgaatgggatatctgctttttcccagaaaccgagctgcggcccagggccatcttcgttcgacgacatggtggtttgagtgattgaaagtcttccgctcagccatgggcttttgtatcctcaatgccctcagctgtggggcagcgggacctgagtccgttgggcgctgattggttctgcgctcatatgcacgagcgggacctcgggaactatcagttcgggtagatgcgaaaggctcggtagccctaacttcctttatctcccgggcagcttacaacatacatagtttcaacaaagattcatatgaactaggagccctaataaatactcaatgaagggtcctggtgatatgaaacaggtgttcttcctggttggataacttggattttgataattctcccggaactatatcaaaaaacggagcacgttgggcatgtgccgaagctactgtgagaatagagacttagtttggatgggaccgcttagagcagggaaaaaggaacgaatagagagagaaagatagttgtatgtgactctttttgtatatacatgtgtgcatcaggagaaaagagatcctagagggaagcaggtcctacccagcagccagctcatcactggctggtttggcttatctataagttttcaactagacacatagattgagctcataaacccaggctttgcttattaccatatagccctggaggaagtgggccacgtggcacagctgaaaatatgtactggaagtgtgaagcggtccacaactcagctcctcatccagcttaactccagcttaatcccgatcaccgctattcaccgcccgtctctttttacttcggaatatctatagtccgtgatcgtcaccaaccctttgattgctcttaccttaagccactggggaaattataaatacctggtcctccccccagattggttcccttttttcttccttcttcatcctagtgcaagggctttacacgtatcagtgaggagacatccgagatcgtgtttttgctggttgaaaactaccaccttgactgcttcaagtgagccttacggcttgcttgggaatttttgaaacatgcttacctcaactccttgactcttgagtcctcgagttgagttcctttgaatttgatgccatgatggatatttgacctcagtgtgcgatcaccagtatcacgtgctgccacatttagatctttgttttgtttgttcgtttgcttgctcgcttcctgtttgcattgtttactagtctactttcatagattgtttggtagatagctaaacgagaggtttagggtttgcaacgtttgcaaagtgtcagttgtatcaacaggctgcttcccactgcacttgcttcttccttcatccttcctgaattgattcccttctttcttgattgaatagacttggtacgtcaccgtctttgcttgcataggtagttgccataattaccagttgatttcacatgttccttccttccctatctatactctaccttccctccccatctgataatgctgaaccctcttgtacagaaaccataccacatgatggaacttgaaagcgatttcatttcaagccacctgccccattagctaggaaacctgtattctcgatcagccatttttgattcaaatgtgcacatagaagtaagtggatatcatgtttgcattgtttatcaaccccggacccaaaaacccgccaaggaacgggtcgggtctaacccgtctacccgcggatttaacccataatatatcctcacgtttgtaattgatgaatgtggcatgatagttatcatagttttcttaataacgatgtgaagagcactcggcctttcgagactaaatgcagtcttagcagtgacgttatgaagaggattctgccgattcacaccgactaagttgagtgaaccccacaaatacagtcgtctccactattccttctcctccttttccccttccccctgctatactctgtacttggttttgaattggatgactcttttcttgaaataactagctagtaacaccgaaggctcaaatatactataagccatactgataatgaaacaagtgagccactatggtgaggtttaacttttgaggcggctcaaaatcaaaagctttatagtcggggttgggtgttgtcgtcaccccttgaataaggccttgagcggaagaaactccaattacaatcttgaaatgaaaatcctctgtgctaatttacccgaccgggacagacactttgacctcttgttggcaaaagagtcctcttcagcgacctgcgatgacctttcattggatggaatcagcatgcaattcaaaactcgacttgaaaaaagggagataacaagcaaggcaaaccttccctgggaggacagaatgagcgaaaaggacggaataaggttggcggctaaagatggagacgttggagtgaagacgctctagaaatctcgcatgtgatgggcccatcacctctcacggatagcgggctagctctagctaaagccatctatagccagcgaggatctcattcgctaccggtagaacaaggggctgggcaactcgaaacatgtacaatcttgccgagtcagaaaaccgacccgcaaacggacagttcttgtgctagctgtaaacgagatctctttcccggtgtggttttagatggttgaaagcagcgtgtgatactctttgatgtcatattagctacgcagtgactcgggcagccgtgtatggtctgcgtcgggacaaagttccctaaagtatattccacgccgaggcacgccgacgataatggaccgggcaaaccccatggggtaaatgatctaccaagtgagcaatatacgagggaaaccccagataataaaacgcccataggtcatcgagtggggccacttgtcgtggctttctcaaacttgattacgattcctggggccccgcattcctgggctctgcattcctggggccccgcgattcgtgaacaaaggtgcctcatgctatagagaggcagtagacggctaaaggtagattaagcggggcgaacttaacccaatttagttgtataggccgtaatgctatagtgcgaatttcttctcttatggaagatatatagtctacagatgtccgactattcttgacatcttttcatcactacgacactccgtgtccttcgctacaatgatgattaccaatatttatgtgatcacagtcatcgctgtgatcggaggctcgctcttcggcttcgatctgtcttcgatgtctgccatgtgagagttatcttcggaggaaacaagcgctttctaatcaatgcagcctttctaccaagcaataccgatgctatttcaacgagggacctaatgggcctccattcaatgatgagtctcactgttccggcccaggttccaatctgcaaggtggaatcaccgcctccatgtccgggggttctttcatcggggccttgatctcgggcttcgtgactgatatcttcggccgaaagtcggcgattcaattgggagctatcgtatggttagtcatgtttcaatgcgctgagctgaaagtagctgacgtgatccacaactaggattatcggaagtaccctctgttgcgccgctcagaacatccctatgttaatcgtgggtcgattcgtcaacggtctgtgtgtcggaatatgctcagcccaaattcctgtgtatgttggagagctcgcgcctcctcatctcaggggcttggtaatgggtgctcagcaatgggcgatcacatggggtgttttgatcatgttctatatctcgtacggctcatctttcctcacaggccctttggctttccggctaccttggggtcttcaaatgatccccgcgattttcctcttcatagggttattgttcacccccgagtctccacgatggttggcaaagaaagatcgctgggaggaatgttgtcacattatctcttctatccatgccaacaacaacctcgacgagaactttatccagatggagatccaacagctcaaggatgcttgtgaattagagcgcgacaggaccgacaacagttacatcgatcttttccggccgcatatgctttggcgcacgcacattgtcgtctttgtccagatctggtgtcaactcactggaatcaacgccattctctactgtgagctccctcctgtccagtgtggtggaattaccactaacatctctagacattacatatattttcggaatgacaggcctcagtggcagctccaacttggtggcgtcatccatcagctccgtgatcaacgtgattatgacaatccccgcactcctcttcatggatcgtgtcgggcgtcgtccattactcatcggaggcagtatttctctcttcatctggtggaccctatgtgctggcctaatgggaggctacggtgtcgcagccccgccaggtggcttggacaatatccccgaagagagttggttgatcacaggagctcccgccaaggtcgtgattgcttgctcctatctcatcgtggcctctttcgcgccaacatggggccctattgagtgggtgtatccgtcggagctcttccccctccgtctacgaggcaaagccgctgccttgtccacagccagcaactgggcgttcaatttcgctctgagctatttcattccgcctgcttttgtcaacatcacttggaagacttatatcatttttgcagtcttcgccttcgctatgaccctgcacgtcttcttcgttttccctgagacatcggggaggacactggaggaagttgaagatgcgttcaagggggttaagctggcttggaatatgggtgcagagaaattcaaggatgaagagataacgcttgaatatgagccgaagcaagacgaaagtgaaaaggctgtgcacgttgaggatactataagatcgacgtgaatgtatatattgttgagacagatcacctgccatggtacctggtctgccaggtttctacccagctaactattcagtcagctagctgtttgtttgtacagaatcaatgctcctccttctccccttcttcccttctctttgccctcttttcttttggaagacaggatagcatcccttttcttgaagcaacctccacgcctagcgaattccgagaggtgagtaatatcaaccccttggttcctcaatttccatggattttgaacttctcgacaatcccgaaagtgttccatgaactcggcataggagtaaacgttgtcccgtagagcacaaacattagactgaaccagtgatgacctcagagccttttccaaagcaattcaacaaccactacagcagatcccattctgaatgctaccgctcttaatatcgagatagggtaaagaggtagtcaccatataacgtagcagcgccattcccttagactgtatcactcgcgtcacctcgtcatcttcacatatgcatgaccttctaaaaattctgtcgacacaatctgagttctccttctccgcaaaatttcacccattgaatatactcccgataatggcttcacggtaggcactgagctcatgtggacgcgcttgctcacagcagaatatgaatagtaggatatggtgctccatttccagtcacatgtcctcctttgcgattgttcttttcctgtctctgttgctcttctatatataattcttcgcatactatttctggcacatcccttatgcccgtctaacaccccacctttttcgacgtgggtaacgagccgcttcagatgataagtcttcagttggtaatgtttttttttccctattggatccacctaatagtatgggcctaatgggccagtcgaggatgcacattgcattagattgtagacgctgcgccagataggtctttctctagaagcatcctacttagtatgaatctgagtggctctcttatcgagcattctcttcgtgatagaggcttttcctcttttctcccctttccgactagcggctagttagaggagagtgacggtcgtctacgtaattgagaacagacctgactatatccgaagctgcctctcgatggcggtctaaataatatcggtatcattaaatcgtttagtcaaattgcggtaggttcggtcgtttactgaaacgacaatcgcagtattattagctcttacctgacaatgatgggcaatttttcgtcgaagaagaactttctctaatttcttctctaaaaatagctgataaaaagcactaggggccaaaataagatcttcttctgtgtcctttgaatcacgccggtgagtaagtagttgggtgggtgaccaccagcgaatcctaactgttgtatgtttttcgttttttttttcgttttttttttcatctagtagacattctctctcatcgattgtaaagtgtagaatgatggaacgggctattatcattacgcagtctcccattttgtaccttcagcaatttgggagacttctttgcacttccttcccttcttggttctatagtacaacatgtggtatggcaactcccacctgtaattcttcaacagatttcgatatgtagagtgggtctgatgtacatttactacgtgactataagaagcgaagaagtgatgatcaatggaagatatgaatgatacccgatgccgatctaactactgccatgaagctccctctagttatagaaacgtacggcaaagatgtgctcaggttctcaaggaaactaaaaaagtataatattcgcagattccaccttgttcattgaagcaacgcagttccaggtacttagttctgactcaaaatcagaagagtcccctcccccaacattcccctctacgatgggatgagaaggacctcctcagccccgtagtagccctatccctaccagggtacattccagagccagcaggtgtctctggtggatcacagagaatttggcattctctcacatccggtggtaaaagaaatccacctttaagacgaaatcctgtaacttccgtgtttgacggaccgcgatgatcttcgttgaggacagctgaggagcataatggcgtctcaaagttctggaaacagactgcaagacatgtcttatctgaaagcaaaccgaggcataaggttgtaccggagaggtcttgtagcgagtcttgatcatactgtgtcctccataggatagagacactttgggatagcagttctttatcccaaagatactgcgagccctcgataatagcttgttgagcacgtgttgataccctcgtccctatcctgcggattttgttccctgttgagacgttgaaactcgtcacaaagacgggattgccatctgacacatcctgatatgtaccccaaccggatacctgtggtgtgtggtcaggtgttaccattcgcggaagccctcggtcgttggtgatcaatgatagatcgtgggtaaagcctattgggaatcgaagaggcctgcgactggcttggtcgcacgtgaatgagattgtaccgacctatcgctcgaaggtacatactgcattagtaacttagaccgtaaatgagaggaggcaatattctctcaacacacatacctcttgcgattctccgacaaggagaacggttttccctataggggaattacctgctgtttggtgccgagccgtcccgacagctggcacaaatgagttccttctgatagggagatatcgagccattttcttcttgatcttctgataccaatcattcatacgaagcagaggcgttggaagcatcgttcggagagtgacgaatgcgtgcgtgggtaccgtaatcgcctcttccccgctagggaaacgaagcttcagacctaacgcggcgtatccatcgacagagttgggcctggtggtaattgccgcaccgcggggaatcacgttcagagtcggttcatcctgcaggatatcgtactgtaggcgtaagcaaccaaaactgtctgcaaatccatcgtggagccaggaatctttgatatcggagcggttcttgaagagaatcgcaatgaacccacttatgaacaccctgacgccgagcgcacacggaaacatctcccgtaacaggtttagatcatttggagaaagaaattttcgggggttgaggataacactgagagggtcattctggagtttgggccatatgacagtagtccgctctatgtatcccgatggttgaacatgaatttccaagccccctgcgtgggtacctgtggttttttggggagcagaatgtggcgctatggcccacatccacttattgtcccactcaagtaccatccagacaggttggaggcagcttagagaagggtggtaggttcgaattaactgccgattcgcatcggtcacgttcggttcaagaagggcacgcgcggctgcggctttctcatcgccccactcagatgagtttgtttctaagagtgaattagcatatcatatactaggctgtattgtcgaagacgcaaatgcttacttggtatctcaatcatgtgccgaaattgttcgattgaatccggcaaaagatcttcatgatgatcaatgcactcggctggtatggcggggtacggaaaaatggaggattctttggcagataaacgttgttttttatagacaggtgagctatgctcttgaagatgaggctgtcttaatccgggcatggtgatggtgatggtggatggtgactgagtataaatcgtgtgtgtcgaagctaattggcttgccgagtgtggatggacaaggatgcaggtcccactgacaattaccactacacctaattgggatgggccaatcagcgtctacttagttatgtcatcttattggtttctaatccctgtccgcttgtttcaccgccttctctaatctcaactggcagatagactggtatcatcgtggaagaagttgtgaccggccgccagatgatatgttttggtggaaagccccgccttggccgaagactcgctgagcgtaaagatggctgcgcgcaatcattgaccgagcacgatcgcagcctggccaacctcactgggatccattgcctaaagcaaaagtgtgaaggggtgcaagacccataacaaaatatatgtaagatttgaagagaagggaccacagctttggtctttatgccgcctgtgtttgaatcgtattggaaagtgacttgacataagtattgcacgccgcctcaaccccctacattatatgatattctgccaaccggccacatttttatgagtctgacattaattagacttaggcttcaaagactagaaatgcggtcattggctccctggagcttatattcactcatttagctgcaaaggcacatcatagccaataaaacgtgattcagcatctttatccaggccataacaatcagctagtacttgtagctgctcttctgagagtatgccatcgaggacagagcctatagataattttagtcgtgaagaaatgggtataaacatcaagttcttaccagtattgatttcgcgtctttctctccaagccctaatccgctctttcaatagagcaattgagtgtccttgagtatcagaaacagcttggctaatcggaatgtggagtgaatcaaagttctctaacatctctgaggcgcgactgtattgtccaacccaagcttttcgaataattgtatcgattacttgatgattggtctgtatcttaggcaattctaattccccatctctattcgtagaaaactcgggtttgaagccatgctccagttgaaatagtagagagcctattgcaaatagatcagttacctcggacagatttggtaaagggccgttgaccggaagcggtagatctgagataacgagatttggttgaccaaacggactagcagcactaaaatcacaaaggatagcagagccccgattattaatcaggatattgtcaatccgtatatcagcatgaacaattccaagcttatgaatatggcaaagaccagcggtgatctcacgataccaccgaattctggtaggctgtgtaggtatctcactccccggtaacggagaatatctgtgaagaaatatcccctccgcttgatcagtgtcgatagcttcgatgatattaggatgtggccactgctgaaatagtcgtagaacagctcgttcatcctgtaacaagctagagtggaagatggtatctgaggcgtagtggtatcagtcgctgtcagaggcgtcgctcccgggttgttcaaaaatgcgacagcttttgaggacaatgtcctcgtcaacctcgtagacttggccggaagctcctatgcccagtattttcagatcagactgaaatagcggccgtatggtataggtgtagttcgatgttccgccgactgtatcattggactgatgaaagctgggtggataggatctgataaagagcggaaatataccagacaagataccaagtgcgccttcaaaaaagagcttccaggccgcacatacagtcgagtaatagttccagaagtagattggcattttgccggtaccgggaaattaggagacgtacaacttgtagaagtggcaatcaaaatcagcggcgtgcagacaccagggggctgaatgtagttgataggaagctaagggggtcagtggggtggtcgcccaactcgggtgattctcaccgtcacgcaaccgtaaaacggcactcatacacaagtgccaatgatgagaaactaaacaatatgttcaaatttacggatgacagatcgtgcgcctggtctaccggatgtatttctggcgcctgtcggcatattattagattggcttaggcgtagtaaatctaaagctcagttgcatcacccatgtggtcaattcgagatttagcagcatggcttataataatattgtggttttgttatttcataccacaaagtcatccctatctctcatgccacttcacaggtttgcgccgatcccagaacggggtgttccatcttgacacaacagattagaatataacaatttagttaccgctgacctagttttcctcaccggtcggggtcaattcacagaatgctttgtagttcgtaaagacatcatcatcgccctcaccgctgccagtgttctcaatcacacactcagcggtagcgccgacgaagaaaacatagccctccttgacctcctcggtcttgttgctaacagtaatcttgcccttgccacgtgtacatatgaagatactggggccgtcgatcgggtcaaaagtggccttggcgccagttcggttcaagtcggccttgataacactgaactcgtcgataggagggtcgtagagcatcacggacgaggcgctagagtaagcagtggcgttcaaaatgacatacgggtagtctgtggcctggatcttctgctcctcgattggtgcgtaggagtaggtcagcatctgggtgagggtgtcaacgtccttgaacttcggggtgaagcccgctcgcaccacgttgtcagaggaggccatgcactcgatgacatcaccggaaatatacgcgtggatatcatctgccttcaggaacataccctcgccaggctgcagcttgacaaagttgaggaagaagaatacgaacaggccgatgtcgttcgggaactgtccgttcaggcgcttggcaagcgcagccagctcagcggggttggtagggttcgtctccacatcacctgccagggttgcaaaactgtcggggctattgtccgcagccgagataaggttcttgcaggctgtctctatcttttcggatgaagactccatcagcgtggtgaagagggagcgtagcgcttctttgttctttcggatgacagcaggttgctctgagttttcgttgcccttgacaatttgctcgaactcgctcgccgcctgattgccaactagggtgcgcagaggctctacagcttggaggaaatgtgtgatctcggcgagcgggcggaagccacacataccctcgaacggagtgatggcaatggtcatctcgggcttgtgattgtcatcttgcaagcggttagccatgtttccgggtgctcgtgtatcgagtgtgatccgaagtaccactcaccgggatagttctttgggtcccgggcatggagctgctccgcgagcttcttgtttggatgggcttggatgctgagcgctttacggatagaaagcaccttgaacaggaacgggagtttgcctccaaatcgttcactcacatcggtcgacagcaaggcctggttgtcctgaaccatgtcgaggagggtacgctgtgtctccacatctttcgatggaagagaggggtgtgtgcccatccagagctataaattgtgagcccatcaagtcgaatattactattgatctctcacttacttctgcatagggtttgtcagactcaattgtaaagtccggggcggctgttgtggcggcatacttggccgctgctgactcttggccaaccttgcctatgacgggatgttagtgcggggaacacaatcgcaagcgggactagcttaccccagtcgtagctattgacgcctaaaggaaagtatgtcagctatgtctctcttattgagcatccccaaacttaccgcattgcagccgaagtagtggtatctgcatattgaaatggatgtttggagggaaaggcgggggtcaaccagcgatcttgtattagaaattccacgccaagccttcggtgagagttgtcagagagggtcccggatgatatctatagcacacgtccagagcttgaaaaggagaattggtctggtttcactcagaggcattcccggctttttgtttatgggatttacggagtggtatcctaatctgtcatagattcctaatgaggtagtacttccgcaagcatcctgccaattagagccaaaatgtacagccgcatcgagacagtatagtttgaataggttcaaggtcaaagtatcccagaattaatcatatataccctaaagaagacaagaaatacactatacaactgtcgacgtcgacacatacaatgccatgtcccaaagtagttagcgtgtcaaccccgaccgcccgggggaacggggcccttatcaccgcatctccaaccttcaagtaaacaacttgttgcttcaaggagatatcaataccacagtggttctggtcggcagtaagctgcttatactctttgcacattctttacactaccccattgataaacggtccgaggatgtctcgcaaccgcccccgacccagagacaacggatttggcaataatgaggaactggagctctggaccaagatctgccaggatattcgaaaatctaaagagaagttcgatcaacaaaactcattatcccagcagattcgagctttggtagacaagatcgcccataatggcaaccgtgagtaccccccgcactagagccctcggctctataccgcaaagctccaatatgcgcttcgcttacaattaatccgaacaaccccaagttcattattaatcgtatatactaatatgcgcttccaagcagaaccaactatggccgaacacgaccaactcgacagctggctccgcctaagccagaaactcagcgaagacgagcgcgcgatcatgcaagacgagccatgcgatgtaatcaaaaacctagaactgctcactgccctgcgcaaagcatctgaagccgaagcgcctccacatcggtccacatcattcaacaagtcacgcaagaaaagaaatgaactcgaaggttcggtaaccgactcccccagtgcctcgggggctgacaagaccgcacgctcaaaggggatcgtcccacgcagcgcaagcgtctcgtcaagcacacaagcccgcgaaggggggcgccaggataatatcatggtcaagatcgaagaagggccgtcagaagggacgaagggcactgtcgcggaacggagtggcttgctggtggttggggctcaggttgtcttcaaacacaacaagaataaacaaggggtcgagggtgaggggatccaatgcataatcaaggctgttaatggcgacggcccaaagaaacggtaagtgatgttaggtcgtttacatctcgtctcgatttacgttgactgacgcgtcatgtctgattcagatatgatgtgcaggatcccgagccgaatgagaatggtgagcagggagcggtttacaagactaccgctgcctctctcattcccattccccagctcagcgcccacttgtctacatatccggctggcaagcaggtcctcgcgcgatatccggacaccaccactttttatcgcgcggaagtgatgggtgccaggaaggacgtctatcgcctcaaatttgagggcgaagaggacgacaaagagatggaggttgaccggcgatttgtgctggatattctgggcaagtaaacccagactgtttctacgatctgatgtgatgatgataccatttaagcgcggcgctatctggagttcgaatgcctaccatggatatggagctttcatcttgactagatactttagctagagaacaaatcttttttgaactatgataattctgtttttagagattctacgcacagaggctgaggctgaggctgagcagagcagtgccagatgtctacaataaaaaagggttggcataacaacaatgattcaagccatgtcattcccatcatgttgcagaaacaccaatctgacgctattacccccaacggcgatgcaatccagcttcttctcggtcgggataatgccgattgccccctcatcgagcggatattgatggcacatactacatttcagtctcaacgaacattcacgacactgacacgcatgatatggaatatagccatgtctttgaaaatggccagggcattgatgatggatgtacctatgtcgttgatatatatactggtggcgtgattaattgccgttattgtttatcctttccttccccgatgtcggcttcgagtcgggaggacaatattcaatgcttgactcttggccactaaaaagccatgcatttcataggatagtgtaactccaggtcaaacaagtctgagatatgtcataagctcttggcgaacacaattctcctatcctgggtggaccaaggcccgagagaatgtgctagagtaagcggtatcaaagcgatgactcagcctgcttctcctcatgccgagggagcatagccggagcattgtctacttcgccattaaaactttccatttaacagaatttgccctatatttccgtcagatcgatgcttccgcactattcaattcctacccctgcatactagagcacctgcagcgagcttcacacgtcacaccttccgactaccccgcctccgccgtcgcaatgaccgacctaccggcacacgcctcaccaaaattcgatgcgcgttcgcccccaagcagattagatggacactcggatgatttgagtcaggagagcattgcgtcaggtgaaaacaccccgactctaccggactcattgctctcgcccgcattcaccccacctgcaacccccgggggtacattgaacttggatttaaatcccaccaaaatccttcaccaaaaccaagcagcagatatccaccataatagccaggatgccaaaggcctcaaattactcccgcagcttccagcagtggaatgtattgtgcgggcgcgaattccaacaaccaacggagcggaaatgttcctacacctctaccacaatgacttggatggaaaggagcatttggccattgtatttggaaacaatattcgtagccggagcttggacagcgtgcggccaggggagaccgagatggaccgaatgatccgcggcgcgtacattgggaaattgcgcccgggtcgagtgagcagccggtatgatgagcatctggccgggtcatcaacgccaaagcaggtcgagccaccgctggtgcgaatccactcggaatgttatacgggagaaacggcgtggtcggcccgctgcgattgcggcgagcagttggatgaggccgcgcgtttaatgtctttccccgtcgaagatcttgcctctgatgcgccgccagaagtccagtccctttcgtcacattcgacaggtggtgtgattgtttacctccgtcaagagggtcgcggaatcggtcttggcgagaagttaaaggcatacaatctccaggatctcgggtcggataccgttgaggcaaaccttttgctccgccatccggctgacgcccgaagctatggactagctacggccatattggaagatcttggttgtggcgcggatgccatccctgagggaatccgtctacttaccaataaccctgataaagtccgcgccattgagggccctaaccatgaggttcttgtaaaagagcgggtgccgatgatcccattggcatggcgaactggcggtcagaaaggaattaagagctctgaaattgaaggctatcttaaaactaaggtatgtttgcaaactattggtcagttaaggattgatactaatatgccgacttttgatagatctcgaaaatgggccatatgatccaataatccatcagcttgtcgttttgaacttttgcctccatcattccccttttcatctggcttatgctttctttcttgcattggaacttacaaaaagcctttgtatatgatcgacacgaccgaacttctttgtgcataatcttgattctttgggcttgttccaaggttgtatatggcgttgatactctgtatattctttttttgtgtggcttggttactcaatgcttccatgttcgccagcttctcctaaaaattggaggttttgtctctagatatatagcacttggaacaaataaagtcagtttcacggtcattcccaagaaggaattcgataatacgcatgcccgcatgaaagtttaaatgactatctcaaacattgacccacatagcagtcacacgtcttactccagagctcctgattttctattctacatttccccggcctgtatgggataagcttaattagcgcgtgtgcaaggccatggccacccgcactacagacgccaatgggcatgtggccccttcgcccgacctgtccgacttgcctgaacgtgcgcaatctactccccacggacccgaagactcgcgaatccctgaacgtgcgacctcgatagatagagcaggactcttggataatggcgcgacgccaggacgcaagcgcaaactgaatagcatgtcgtcaagaggtgttgccaacctcactcctgatcagttggcgaaaaagcgggccaatgaccgccaagcgcagcgcgcaattcgagaaaggaccaagggccacatagaaggtctggagcaacaggtccgggacctgtcatcacaaaagccctaccttgatcttcaagcagctctgcgtgagaatgagttgattcggtcggagaacgcggagctccgccaagggctgaaagcggcaatggacattctccaaccattgatggctaagccagaactgcgaggtgagttcagcattccaataaaattcaagtttggggctgatatagatagatgcgtctcattctctagctatacccaagtccgccccgcccgcttcgcatacatccccattgtcctacaccgaccacctcacccccttttcaggcgagaaatcctaccccgagtctcttgccagccttgatacgccttctccgactcattctgcgcctaatttcgggagtcgccgcaacagtacaaatggaagccctccgtcggcatctctccgtgtcgcatgggactcgcaacgccataatatcactcacggcctagacctcggctgcgaggagcgtctagggtttaatttccttcttagtgatatgcatagtgttcccaaagtcgacgttgttcaccgcagcaccccagataacctccgctatccgcagctgaacccttcgtcttcaatatacccacatccctggactactccctctaaaccagggccacctgcattcgccgctccggtacaaaacttaacagcgacatgtccgttggatactatccttttggaatttctccatagccgacaacgcgaggcggctcaaggcatccctagacaaaaattagccgggccaccgtacccgagtgtctcttcgctgctgaatccggagaggagcgtctactctcatccagtctcaaaagtcttcacagatatcctgcgcgcctttccagacgtcgattctctgccggagcaggttgctgtcctctactccatgtttctcatcatgcgctggcaaatttaccctacgcaagagaattatgagcgactcccagattggttaaccccgcgcccgacacaacttctccatccacaccctgcttggatggattacgttccctggccgcgaatgcgtgacaggatcgttaccaattaccagaactatccgtttgagaattggttcatcccatatacgcgtgagatgagcctcaattggccttacgaggatacggactgtttgctgtcaaccggagactcgggcgagctggttatcaacccggtcttcgaacggcatatgagaaatttatccaattggtctttggggcccggatttgcaaaatgttttcccgctttggcagacgctacacgaatcatgccgaagccaaagctcaacccatcaagcggaacagactcacatagtggctacacgaccacttaagcggcattccaactggtccacctctatcaagttgatcttggttagaatttttaaattccatgcctcttttcggcgaaaaggaaatcctagcttttagctagtcaaattgtttattttttttggtgcttagttttcttcggcggagtcttaatacacaagggaagaagcatgctgtgagaagggccacggtcacctcattcgcgttgtcaatagatgaatcttgaagagatcatttctgtctggacattcaaacaaatacaaatcttcttagtaatagttactctgttgtatatcttatgggagcatggttttgactttactctttcctgctcttctcattccaaaacgccagaccagccttctggcgtagaattccgtacatcgaactgctatccaggcactctccgccatattctctcgcagcctccatgttagtcttggcaatctcaaggccaggaagctcaacaccctgatcctgggccattgacatagcatgtctagcatccttgatagcaagagaaacaccaaatccaggatgagagtccaggggtggcgcataagcaccggtagtcaatctggaaacaaagataagtatgaaacgccatgccagcaccgaaaaaatactgtaacacacctcttagaataccctccggcaacagcaccaaaagcctcgccaatgagttcctccataggaccagttccaagtccggtcttctcagcaaagacctgagcctcaccaacagcctccatcatgttaacagtaacaatgttacccgcgattttcagaagggaagcctttgtcgcatcctcaccgcaatcaatcacgcgccgacccataacatcctggatcagaggtttgacggcatcagtcgcactcttcgggccaccaatggcaaaaacaagtttgccatccacggcaattgggttcccgccgaagaccggcgctgctacgtacgatgcacccttgcttttcagctccgatacagccgattttacagtatcgggatgcactgttgagcagtcgacgaagatcttgtctttcaaggactggcttgaacccatggcggtggatagcaggctttggaggactgcgtcattcgagatctggaagaggctttagacattgctatgtatttctcggtggaatctgcttaccatggtgaagataattccacattgagacaccaacttctcgaaattggctactgggattgcacccagtgcttgcaggggtgctccgcgcgacatcgtgcggttcgagtagatcaggctcaaggccttcttcgtggctaggtggcgctgcagattggaggccattgctaggcccatggatccgagtccatactgtgttttgttagttctttgttcataattgtaggtgctctagaggctgattacccagccgatttgtggcatcgttgctcgctctttttcctctggatggattcaaagggcgacaatgggctctttagacaacgagtcaagatcgattcgagggattcaagcgaaatttggcaatccagagtttacctgtgcagggcaatgcgatccttgtatgagtctactttgtagggacgataggaatggtggagcgtgtttcccgaggatatcggtgtcggccgacaggatacgcttcaacgttatcaacggtactgcatatctgcaggttaaaccgggcttggacattgttcaatgaatagtcatatgattcgtctctttgccatattcttgcttggtgtgtcgctgtagtcaagtccacgtgtataccccttaatgtgagacgttccacatatactataacctgcgcatctattgatttcagcattatcccatgctccttaagacctcaaaatcttcttttaggccctaatttatcatctctgagttcgtctggtctaagaatgcgttgacgtggtcacgtaccgtcatggctgcggctcgccgcccaactgtggggtgaatatcaggtacggtacggtcacgtaagttatgatgctccgtctgtcgtggacttgacttcaaatatccccaacacctccgctctcccctgaaccctcctatttccactcatcttgggagtttccgaatataatctcagtcttggacggtacccctactcccaaccgtcgaatccctaattcctccaacatggcggaaatgcccattggtacacaccgattcccccaggctaccgtgtcccagctccaagctaacaagctactccgcagtcctcgatggaggaaccggcttccttaaggtcggctacgccgcccaggtatgtcgcatgacccctacagtccatgtttgctcttctctaatttatatttcctcgtcagaacttcccagagttccagtttccctcgatagtggggcggcccatcttgcgaacggaggagcagggcggcgacatcgtggtcaaggatatcatgtgtggtgatgaagccgccgctgcacgatcaatgctccagatcagctatcctgtatgtttatatcggggttcttgtcctcgcctgacctttctaccccgcctccgcaaaccagtcgtgttgtcaatgcctaacccgcgctgctttagatggagaatggaattgtcaagaaatgggatgacatgcaacatctatggaactacaccttttacgagaagatgaagatcgaccccacggaccgcaagattctcctcacggagccacccatgaacccgctcaagaaccgcgagaaaatggccgaggtgatgttagaaggatacgggtttggtggtgtatatgtggcgatccaggcggtgctggcactgtatgcccagggtatgtgatacaagaccacagtgtcagttgaagaccaatactgatgtcatgtttcaggtctgagcagcggcgtggttgtggattccggtgacggtgtgacacacattatccccgtgtacgagtcgaccgtactcaaccaccacattcgccgccttgatgtcgccggccgcgatgtcactcgcaacctgattgccctccttctgcgccgcggctatgcgctgaaccgaaccgccgacttcgagaccgtccgccagatcaaggagaagctcgcttatgtctcctacgacctcgagttggacaaaaagctttccgaagacaccaccgttctcgtcgaatcgtacaccctgcccgacggccgtgtcattcgcgtcggcagcgagcgcttcgaggcccccgagtgcctgttccagccacacttggtcgatgttgaccaacctggtatggctgaaatgctcttcaactgtatccagggtgccgatgtcgatgttcgctcgagtctatacaaggccatcgtgctcagcggtggtagcagcatgtaccctggtctgccctctcgtttggagaaggagttgaagcagctctggctcacccgggtactgggcggcgacccagagcgtctgaacgtacgtcgaagagaacccgacaattaccaatataacatggctaatgattttccagaaattcaaggtccgcatcgaagatcccccgcgtcggagacacatggtgttcctgggtggtgccgtgctcgccaacttggttagtctcgtttcttttcctttgaccccggccctgctaacactattttcctcagattgccgacaaggacgacatgtgggtgagcaagcaggagtgggcggaacagggtgcacgcgccctggacaagctcggcccgcgatgaatggattttatttaggcggttcctggtctgctccttttttctctgatttcctgcttcgcattgtttgcaagccatattgcctgggtcttttttccctattctcgtttccttctttgcctccaccttccccccatcattgtcgatacactcccgtccatcttgtagtttcccctgtctcttcgcctgcttcctacattgtgcctagactggtctggcgcgggtggattcagggcgttcatggtagaaaagaacgaaatatttctatcggcttttctttgtataccagctttgtaggttatctacgtataactatggtgggacttatgatcatggttgcatacagtctatcgtcaacatcagtataaccaagacaaagtcatacccatatgtacctgcttctttcctccgctagaaaatggctaccctattcctgggtagaacgaaacgtgtatataaactcaagaaattcgaaaatgcaaaatgctgcacgcaaaatgctgcacgcaaaacgcaacaaaccaaatgaggactatcacaacagaaggagtaacacaaagagagaaacgaagaccagtcggcaaccaaccccaaactaattctcaatggcccccggcgagaccgccaagataaccgcaagagtagcaataatcagcgaagcagccacaaacgccgtaagtgccacactaccccgactagccgggaacttcccccgaataatccaatactgactctggaagtagcggtggaagccaatcataaggataaggatcgagacgccgatgaaagtggagccgaggggtttacccacgctacgaagacgggcggttgcagaggaggtgtggaggtcggctgaatcgtagcctgacgagtcgaggtacggtggaaggatgcctgcgtgtaagccggatgctgggtcgaagaagttggtttttgtctttgtggaggcgctgttcaggcggaagagttgcgttactgcgatgccgattgaggcgaaggctagggaggtgcgcatccaggctaggaaggttcgttctgttggaaagggggtgggtgtcaggggtgtctatgcatgttttaaatataggctgcgtgtgcatattgtacctaatgcgaggtggtcgcgggccacactgcctttgttctctagctcgagactgccgtattgatctgcgaatcgactataccaggactgatggggctcgggggccgagtcttgggtggttgattggctggcattgccagggttcgcgttgtttaattggtctttgagctgggaggcgtctgcttgctctgtggactgatagttgcgccccgcgggaccggctgtgttgattggggtagattcggtggattggtatgatgtctgaggttggttctggttacgctcgtggtttcgggtcgaggagcttgagtgggaccgggtgctgctggaggaggatgacagagctgaatctgtgggcgagcgtgacgatgagtggctgtttttggctcccccagaggtgctggagcctctcagaggcggcgccaatgagtcggatgtattcattatgcctgtccgcgtgtttttgtgtcactgaagagagtattgtgcaatccacgatcgccagggaccgagtttatgcaggtctgaagcgccggttcgtctatgtcaatagaggatgaaaagttgctgtttgagacaagatggtcacggtgatggagagcaatagttgtgtctgttatgctggactcttactatctgcatttcctttttctgctctcttctccaattgcatcaagtataatgtcacttcgagcaaaagcacgcaaggtgatgatctcccatccacgtgaccaatccggggaagcgatcacatgctccactctaacccacctgggtgaacccttagtccgaagtgtcgatgcaacttgtcaagcttgacatgctgatatggacatccaatgtagatatttacttctagtcaaccatttactctgatcttcatatcttattttacaagctaacacctcattatcttacccgtctggtaaagtgcgtcatcctctgtttaaggcaggcggtcagtcctgcttcatccctttatcaacttatcgacttatcgatttccgctcccctcactcaaccaacacaatggcgtcacaggcacctttaccatctcctacggggaaggtcgatctctcgaaaaagctctctgagttacggtcaaataaccgaaggggaaaccccagttcccgagatctgactccagcaacccctcctctcccttcgccgcccgacctctccggccaccagtaccagcaaccaatccgccgcatcctatctcctaaagaccatgagctcttcctcgcatcgccgacctataaacttgtcctcgcctttatattcgggctaactgattctgtgcgggggcattctatcccggacctccagaaaaagcctcaatccgaatccatctccaaggtcctctcagtcatcactcaaatacgtgccctcctagccaaaaacccgccaattgaccagggtggatccagattcggcaaccccgccttccgagcattgtgcgacgatgtaagcgcccagagcgcatcatggcacaccaacatcctggggttgaaagactctggcgcaatcgaagaagcgtcgacatatttaatccactgcctgggctcacgggagcggattgactacggctccggccatgaactcaacttcatgatgtggctgctatgcctgtaccagctaggtcttctccccgccagcgacttccccgctgtcgtgatcaaggtctatgtcgagtacatgcatctcatgcgcgagatccagtcagcttactacctcgagcctgctggatcgcacggtgtctggggtctggatgactaccatttcctgccgttcttgttcggagctagccagcttgtcgggcacccgtatattactccgctgggtattcataacacagctactttagatgaagagggtgataactatctctatctggatcaggtccgatgggttgagagtgtcaaattggtgaagggactgcgttggcatagcccaatgctggacgatatctctggttctaagaattgggccaaggttgagagcggcatgaagaagatgttcgttaaggaagtgctgggaaaacttcctattatgcaacatttcttgttcggaagtcttatacctgctgccgaaggcatgaccgattcttctgagagagatgctgagcatgagcatgcccatggccacgaccatcctcatgagagttcagactggttcggtgactgctgcggcatcaaggtacccagtaccgtggctgcgggcgctgagatgcgtaagcgtatgggcggcggatcggacctgcgcccaattcctttcgattaaggtcgccgatgggaagttggaagttggcatgccaacaaaataatgaatcaagatgactagcatattagaaaatgcaaaatgattatctccatgtgcttcagtcaatcgagtaatttgcttctactcctacctactgccgtatgtacctctgtatactccgctccgtatacaagagctcttttccggttagaatcaacgacaaagtacattactcccagtatggaacatatggtgagacttttgcctgatttaccatcataccatcactcttagttattagtgttattagtctaccttgggaagtttagcaaaaccctagactcggcaatgcagaagcttccccgcacggagatctatagaccacgaactactcatctcggcgattttgcggacttgatcaacagaaatagtcgacatccatcaacttcgcttctcggtgatttcacgggctacaagaactataatcggaaacaagcactcggttattcaatagaccgcggttgagacaaaccatgatataaccccatttctgtctaatgtaccaacaatcctcgaacagctctcacatttatctacatcaaaaacatgtctacccagtctcgagctcctgcatccgctgagtctggaacatttactcagcttgggacattgccgaatacatacacttccgacatcagcctgcagcgaatgctaggatgtaagtccagcgtggggaccacctttgttcaatctaacctgaagacaataaatagggtatcttcctgcagagactctcaagttagttgaaccccatctcgcacaatttggcgaggaggctgtttcgccccaaatctttgcatggaacgccgacgcagagaccaacctgccatatgtcaagaagtacaatgtctggggccagcggtatgggtatgacaaactgattacgactgatgggtggaagcagttaggaaaatggggggcgaaacatgggttagtcgttctcttttttgatatacatttgacgctaatacgaaatgtttagggttgtttcgctgggctatgaccacacatacggtgttcatagacgcactgttcaatatgctgcgtatgttataattccttgttctttcccgaactgctactaactaccggacctaaagagtgtatatatacgtcccctcgtcgtccatgtacagatgtccgatgagcatgtccgacggagcggcatttatattatcacagcgtctcaaggatctgccaaatgatcatattctgcacactgtatttcggaaactgacctccagaggagacgactactggacatccggccaatggatgacagaacgagcaggcgggagcgacgttcaaaacacagagacatgggcgacctatgcaccattaccacaagcatcgaaaacatccgacgtcctcgccgagggcgactatttgatcagcggattcaaattcttttcttccgcgacagacgccaatgtcgcttttctcttagccaagacagattccggcaaactgagcacatttatcgcgccattacggaagacatctatcggagcagatggaaagccagaagaagtatctaatggcgtgcgcatccaccgcctgaagaacaagcttggtaccaaggaactacccacggctgaactggaactaaagggcatgcgtgctcacctagtcggcgaaatcgatcagggcattgtgactattgcgccactattgaataccacccgtatccagacgcttcttggaacattatcaacctggcgtcgtgcgattagcattacaaagaatttcgccaagtcacggactaccgtcggcgagccattgtggttgattccgatgcatctgcgcctccttgcggacgtggaggtaaagcatcgcggcgctataaatctcaccttcttcacaattgccgtgatgggtctgattgagaatccatccagctctgcgagacatgcacatatgcctcaggatctaagcgaagcaaaggtcatcttccgcgtcctcaccgccacatgcaaaggcgttgtcagcaagatgtcgatggtaggcgttcaagagtgccaggaagcgatgggtggagtcggatacattgacgaaccagacgagcctgagttcaatatctcgcgcctcctccgtagtgcagccgtgtatccgatctgggagggtacgacgaatgtcctggctagcgagctcgttcgctttttgatgaaaaatgataacctgtctgttttgtcggggtggctcagtcgcgtgttgtctttgatccgcacgtcgtctctcgcgggtgcattgaagcaggctctggcttccttcctttctcgcgtgacatctattcgtccgctggctgcgttgctggctgatgctcgcagggttatgtttacctttggctggattcttgccggggcttttctggctttggatgcggaacgggatggggatgaggccgcgatggaaattgctcgcagatggattctgttgggtgagggtggtgtgggtgagtttgtctaccgggatattgtcaagccgtatcaggcctttgattcggcttccgggagtgatgagcatacgcggttggattgtaagattgcttggggtgttgaattgccgtccagggtggtatttgggcatcgatctttgagcgattcgaaactctagatgtaatcaattggatgaagtgcttggattcaacatattcaacattgaagcagataagtcaggttgtttagcatggtaaagacgctttgagattgcttgatcttatcaacatcccatccaggggtttctaagaaatacaagtgatctcgtcggcctacggccgtcgagatagtcgttgcagagcaaagcgactgattctaacttctaatgctgcgcaaagcccccctcttacttgttacgatccaacgttgccttgctttgcttgtttgcttgtttgcttgtttgcattagctagattgtttgctagatagtttcgcgagatgattcgaagtttacattgtttacaaagcggtcaggacacagctataagaactagctgtccgatagcgatccatatggatcgtgacaagaagtttgatagctctaggaaaacttaggaaaggtatggacattatatagatagatggtaaaccaatacgtttggttgccttctgtgctgctttcattggagatatgccccagcaacaagataatgctgggtttcggaggcagacagcgacgcgtggatgtcgaaaatatctggtcactgagccatctactgccctcagaggcaagctcctatggttcccttatctatttccatcggaaaatatggctgatgttttccttttcttcctgtcatttacgaacgagaagtctgtccccgattatttcgtgtacgaatatgatccacttttgttattctacgtctaactgatcgaatgattgccggcatatggtgacattgtcggagattcgttcaggccggacctcgccctcgttataccctcatcattccttatcacaccctcgtcgtaccctgatacgattcctcgccctaccggctgggctcacctcacagcccaaggaatatccaggtcgaggaagaggtgtcctagtgccagcaccacgtttgtttggagataaaaactaaggcacatcaatggaggagtgtatatgggcgcttcggattcgggaaatgatccgaatctgaatatatgcgtctacaagggtggaagcatggatcaacgcatgtatatacctcgggaaacagaatacttttaagcataataataccttcctaatactcgcataatactaggcaatgtagcgaatacgggaccaatcctgactgaatacttgaagaatactacattttgagccaaatactcgtagaatacgtattatgctagaacaacggtaggatgtgtaggaatttgggaatacgttttcgggccgcaatactggattatgaccgtcatactaccggtattcaaatctaaagacacccctggatggtctacatactagttagatgctgacagaccgagatctggagatctctacagaccttgcgtactccagacataacgtgccatgttggtgaggctctctttgcctagtcgaatatcagcctctctggggatctcaggggcccgtccgaaaatgtggtcgaatggaattgtgatcgggtgctgcgagactgtgacgttgttcggtgcttttccaatcacgcaggattgcgtgacccttgggcgttgggcaccggcgtcccattcccacttatcgagtttgagctcaggtttcttccggctgactttgatggtgatggccgttttcgcttggcctctgagggggtcgacccacatgcttgcgtcgtcgcgcaatttggtttcagtctcggaaacaccgacctcgaggaccaccccgggtcgtctgggggcaccacgagggggccgaagtgggccccagccccagtctggccgcttcacgtttccgtcgccgacgttgacattcacgttaccgaatccttcaactgcatcacagagtcccataggtagcaagatttttgtgaattcggtttgcagtccataggaaacttgagcatgctcgggggtggacattctgaggatcagggcgtgcaaggccgcgttgtagaataaactggtaccagcgagtagatcagagagcagaaagtcttgctcgaaggttgatggatcgatgaaaataacgaagtagtctgagatttcggacccaagtggttgacgagggggtaatttgtgcaggcggtgcttttcattttgtaggatttgatcgaattgctctttccctttataggtgtatttgtttgtcgaaggaggcaggttgtccagaaagcgctccacatcactttcccattgagatccagccattatgaattatttctttcagtatttatttcctacgagtgtttagaagaaaaagtagataaagatgagaaaaaaggtctattaaatgaatcggagttacctcagaatgagcgcatagtatatccatcttgatatatagttgtattcaactcgccaccgcctctgattggccgaattcccaaatcgcaacagaagaacatcgagaacctacattttcaaccaacaacacacccaagccaaatattacaatccactcagtcgaacatcgcactgcaatctaaaaaaaagaagcaaacccctcatatctacgccaacacacaaaaccgatcgcccactccccacctcttactccgcacgccgcgcacgccgcacacgcccatctcccctggacccaacacctctacaagcggcacgccacacgaaaaggaggtagcctggatagtcgcgacctacggcattgcatccccgaacctaacccagcaccgcgagcatggcgggcgacgagtactctgtcggcgggggcaagctcaagctgaaggggagtaaagtcagcggagggcggatagagaagaaaaagaagaagagcgggaagaaaaaggagggggaagcgacgacgcccaagccggagtcgacgccagatacgaagcggccggaaaacgaaacagaggacggtgtgaggtctgaggaggatagagagaaagagagggatgcgcctgggaagactgaggccgagaagagagcggaggaggtcaggcgcaaacgggtatgttctgttgttcttttttgtctttttgttgggcttgcgctctttctgcttcggctttgttgtacggggaaactgactttttgggacagttgcatgagcggcttcagcgcgaaggtgtcaaaactcataaggagcgtgtggaggagttgaataagtatcttagtcggctgagtgagcatcatgatatgtacgtcttgctctttttacctttgttgtttggataagctgacattttacataggccgaagattggaccgggctaaatggttatacggtttcacatgggtttcgatgcgatcaatctgttattcaagaataccatatctgtactattcaatacattctgttcaactgtactccgtaaggctgccatgtttcagtgatgatccataatccaggatactccactggagtataacgtaatcggtaagcgagtggccactgtaagcgagtggccaccccacccaagaggatannnnnnnnnnnnnnnnnnnnnnnnnnnnnnnnnnnnnnnnnnnnnnnnnnnnnnnnnnnnnnnnnnnnnnnnnnnnnnnnnnnnnnnnnnnnnnnnnnnnnnnnnnnnnnnnnnnnnnnnnnnnnnnnnnnnnnnnnnnnnnnnnnnnnnnnnnnnnnnnnnnnnnnnnnnnnnnnnnnnnnnnnnnnnnnnnnnnnnnnnnnnnnnnnnnnnnnnnnnnnnnnnnnnnnnnnnnnnnnnnnnnnnnnnnnnnnnnnnnnnnnnnnnnnnnnnnnnnnnnnnnnnnnnnnnnnnnnnnnnnnnnnnnnnnnnnnnnnnnnnnnnnnnnnnnnnnnnnnnnnnnnnnnnnnnnnnnnnnnnnnnnnnnnnnnnnnnnnnnnnnnnnnnnnnnnnnnnnnnnnnnnnnnnnnnnnnnnnnnnnnnnnnnnnnnnnnnnnnnnnnnnnnnnnnnnnnnnnnnnnnnnnnnnnnnnnnnnnnnnnnnnnnnnnnnnnnnnnnnnnnnnnnnnnnnnnnnnnnnnnnnnnnnnnnnnnnnnnnnnnnnnnnnnnnnnnnnnnnnnnnnnnnnnnnnnnnnnnnnnnnnnnnnnnnnnnnnnnnnnnnnnnnnnnnnnnnnnnnnnnnnnnnnnnnnnnnnnnnnnnnnnnnnnnnnnnnnnnnnnnnnnnnnnnnnnnnnnnnnttaaaaaactatcattcaatttgggattgacccagacgatatttataacttcgatgagactggatttgcaatgggattaactgtaacggcaaaggttataataagaagtgaatactacggtcggagatcacttttacaacctggaaatcgcgagtaggtaactgcaattgaatgtataaacgcggcgggataggtcctccctctgtgtattattttcaaaggcaaggtcttccttaaatcatggttcgaaggccttcctagtaactagcgctttaaagttagtccaaataggtggatatcagatgaaattggacttcgctggctttagaaactctttatactattaacttcattgtgtatagtaggaaggtatcgacttttggtactcgatagccatggaagccatttaacccctcaattcgattaaatttgtgaggaaaacgatattataccaatttgtataccactgtattcctcttaccttttacaacctctcgatatcggttgttttgcggtagtaaaacggtcgtacggccggttggttgagatgaaaatgcggaccgggatcaactatattaataaacttgaattcctcgaagcatacccctccgcacgaattgaagcttttaaatcggagacgattaaaaatagcttctcagtagccggtttaatacctttttcacccaatcgggtactttcaaaactcaatatttatcttcgaacgccaaccccccccctaagccggggtagcgatttaagccggaatttcaccccaaaaaccccttttaatagcaaagatctacgtcgacaggctttgtctattaaagctttacttcgaacccaatctcgaagcctaataagcccttctaaacgtgcattaaaccaacttatcaaaggctgcgagcttgcaatgcatagcgctattttactagcgaaagaaaacaaggatttacgggatgaaaatgagaataagaagcaaaagcgggcccgatctagacggcagatacccgccgaagaaggcctctcagttcaagaagcttctgaaatcattgctaggctggtggaagcattagaaatacccctacaccccccgggcggaagcactcaatcagggttagaaccacgaccacgggctgcaccaaggtgtagtgggtgtggaaagacagggcataagatcaataggtgtccagataaatgatcttttttagtttaattaatttaatggcgttctggttgaaatatttaccttagaaaactatactcttgggtagggtggccactcgcttacagtggccactcccttaccgattacgnnnnnnnnnnnnnnnnnnnnnnnnnnnnnnnnnnnnnnnnnnnnnnnnnnnnnnnnnnnnnnnnnnnnnnnnnnnnnnnnnnnnnnnnnnnnnnnnnnnnnnnnnnnnnnnnnnnnnnnnnnnnnnnnnnnnnnnnnnnnnnnnnnnnnnnnnnnnnnnnnnnnnnnnnnnnnnnnnnnnnnnnnnnnnnnnnnnnnnnnnnnnnnnnnnnnnnnnnnnnnnnnnnnnnnnnnnnnnnnnnnnnnnnnnnnnnnnnnnnnnnnnnnnnnnnnnnnnnnnnnnnnnnnnnnnnnnnnnnnnnnnnnnnttacagggcccactcgcttaccgattacgttatatcatgtgataataaggggctcaagattcaataatatgtatagttcatggctaaaatgaccccaaagagctctatttagcagtccccgaaaagtgaagaggtatgcccaaaatgcgaaagaataaataaatgataaatatcaaaagatcaaagaaaagatgtcaacaccaagcacaacgccatgcaaatgaattccgcaaaggctcaacccaaaataagccgcggccaaaaaccgagtccgatctagatatagatcacgaataaccgaacaaaatagaagaggagaccaagcccaagaatcgaatcagagaagagggaaaagaaacaccgcgctaaatccagaatcaccgcagaggcgcacaagaaagggaagaaccggatcaaatgggaccgaatcgaagccaagccaaggctagcagggatagcacctgatcggccgggggcagataagaacagataggggggaaagaggaggcgagatgggtccgagcctccatagactaggcgggcgatccttaagaataatggcgccatccgcgcccccctttgtccttccagccgagagaaaagcgacgaaaggatcggctatttctcatttctgattgtggttcccggtctcatacgcccttgacaacgacggtgcgttcgctgttcagcttgtcggcatttcgagcgtgtgattctttcttgcagtcctccaggccggtgcaggagtgggcttctagcatgcggtgcttggagcagaagtggccggtacagaagctgcagtcgccgacgatgcgctgggcggcttccttgcactccttgaagttgcaacggggcttgcggggaggcattgtggttgggagtgttggggtagatagagcggttgagaggttgaatgtaaaagtgtcctttcgcgaaagacgaaagacaagagataaataggagtagcgaaggcgagacgctggggagaaggtttgagataagcgccggtttcaagtgcggaggcgagcgggggaggagagactctgtcgaagaaagtagtaaaagggggagggagggaaagatgggccagcacgaccagcctatatatagggtaaatcggaagacacgggagaaagccaaagaaaccgacttccaaggttctaaccagagacgggggggctgactcagtgaggcgacagtgacggaatcaacgagtggagttccaaagttctgttgttggcgatttggggatttccaagtggattcgggtgggttttagtggttttagtggatttggcattcaatcgattatttcgaattaattggatttgatattggaattggaggttagcggttatttagtgcagtgaggtgattgaactatacctgtctatctatgttgtatagttacagagttttaaagtattcaatattgatcttctcctttcttcttctttctttttttctttttcttttttccttttctttgactttaccaaattcctctgcatcccacgcggacgtatcacccaggcgcctggtctcgggcccaatgatcggaatgtggaattgcccgtgcatccaagggcgcctttcacgtgatagtccagtcaggtgtcgcaaactaatatagaaagtctcaactcaaccaactcaaccgatgcgatctcagatcctgtttgcgccaccagagtggcaaggtgttcacccagacttctccgactatggtactccaggcacctccattaccaactatatcatcccgaatataactacaatcagtgcctaacgacactactcccactcaatgcaatgcaaacaaaaaaccatgcaagtcgaccaaaagagctctgacctcgagataaaatagacgagtcgtctgagccaagcccggcctaggtacgacggatgatccgcgtggagctattgcataaccagcatcggtactccgtaacagcatatgcagaggtatggagtaggtacggagttggtgagactaagagaggaggtgatgccctataactactccgtatactccgtacatttcccggtttaggcctaaagtgagggccgatcccgctacccaatttcaccgtctcctctcctctccacatctccccaccgtcgctcaacgtagcaggacgctacgccgtatctgctcacggatccctcgctgataacacgctagacggtacaaatcagaatcctaccacgttggcgtgctctacacgggccacggcctacgtggtcatggtcaatttaaaatagtgactagcgtgcagcgggattggtttcatgatatttatccactggtaaggttggacaagggaaaaagaaaagggaaacgtaaatgtgaatcaaaaacccgtggacgccggcgcagacgccgatgatacgctcaaacccccttgcccggcccaaatcgcaaaaggtaaaaacggaaaaaaggaaaaaagggcgaggaatcaaatcgcagcatcgcatatcgcatatctcatatcagactccgagctcgtttgccttgcctgcatccgggtccaagtagtcctctcgctccgctgcctcgtactcgccgatcagatccatcacaaccgcccgtgcctcgtcaaattcgccaagtccgtcagcaaacggagcttccttcttgtaggaatccaagaacgcatttcgctttcggagcatgtcgtagtgcttcacaatgcgcttgaagagcgtcgcgacagaggtgtggttggccagcatcagcccgctgacgcgatgtccggtttcctcaatatacggcgatttcttcgtgagagccacctggatactggcagggccccaggggatgaaggtagcgaggcgacgctcccggatgcgcaggagtgacttgtgcacgtcggtcgggtcggcttcgccctggatgatgttgaggatgctgatgtagcagctggacttgctgggattgaccgagaccatgcggttcttaggctgtagaagacggcgcatgacgtctaggacggtggtctttcgcaccgtcctggcttgctcgatgttggcgcccgtgaacggtgtgtatgatgtgagaaggaagtggctgcgtggcgtggggatgagcgaggcgatgatcccggcgagatcgttgtgcatgtatccagggtatcggagcgtggttgtagatgcagacatcaccgtagaaacgagttggttggtttggtggaacgagggctcttggacgtgcagccgatcagcgacaattcgtgacagagcgccattgtccaggacgaccacggagtcggcatcctgggtcaatcggcgcatggccagcaagctgttgtaagggttgacgacgacatcggactgcgtgtccgggaagacagagtaggtttgaatgagtttcttcgggaatcgatcgttcatgcgttcgaggatgaaactacccagtccagagcctgttcctcctgcgatcgaatgtagaagcataaacccctctagtgagtcacttccgtctgcttcgcggtcaatcatatcgaaaatctcctcttgcacgccctcgcctgcagcatatccggtaccccaattgtttccagctccgataccttgttgtccgacgaagaagttctcggggttgtagatattcttgtaggggccagtctggatagcgttgaggacctggaacaatatgcgttaatcatcgtggtcgatttgatatatcggtgaggcctaccctgggttctaagtcgaggagaatcgctcgagggatgtaccttgtgtcgtcactctgccatatgttagccagtgttcttgtccaccaagcctatattttcctcgcaagcttcctatacacacctggtagaagaagacatccttgcgatcaccggccgccccgtcagtcgcatgctcctccaggtttccatctgcgctgatcccgtgctcctggcacagctgctgccagaactggctgccaactagatagaacgaatgttagacgtgaactatagtttctcgtgctccgtttcaaatgactagatcaacgatcgtggaatggatcgcagagttgagccacataccgttgttgccgcactggccggcttggattgtgatgatttctctgcaattgccaccaatatcagcatcggtattcaagctggagagagacctctcaattatgcttgactcggaagaatgaacaaaccttggcatcttttcttcacagaagccgtcgagtgttgctgctcgttaacgcgtatcgcgtccacgcggggaactttttggccgatattgccgcctcaggcagaagctcttgccaccttatgtggacatcaacaacgttacaaaggcctgcaaataaataaattcgcgcaagaatgagagttgattatccgaaatataaatgctttttaatccgcccagctatgctaaaattttgatataaccgtcttccctaagtggtctacttggccaaccgttgccctggaccactagaatcctgccttcaatgctgtgatgaggttgccagcaccggcaaccaccccgtcgacaatccgtacacgtcggccttctgtatctccgtattcctgagtacagccctcccgtaccgcttcctccatgccagccataccagcacagcccagacacacaaccttaacatgagattccgagttgcgaagcaggttgcgagtggcatcgatgatccgccggcgcacctcctccggctccgtggtgtgcagctcaacggctgtcaggccggtggtctcaacgcccgcaaagtgtatagagctcccgtcctcgaagtcgtaacccagcgctccctggactgcattggtgagctcctccttccacgcagagccagtggtgacaatgccaaagctgcccttcccttggtacttgtgtagcctctctgctgggttgattggatctctcaacgtgaacccactaaccaaggagagcgcagcggtgagggatgcttcaaagattccagtgacatatctgtttctcgtcgagctcgtttcttcgcttgccgtgatgtcctccctgagtctgccgacgaatggatgcgcggagtaacacgctacgagaaaagcgtcgtaattgccgataaactcccgtacgggccagcaattcaatgccgatttgcacgattcttcggcgttattgatgctggcgattggctcgatctcgattccgtcgatatccagggtggagtctggagcagtgaagtactcgaagtgcacgtcttggtagttcatgctagccaatataggcttcaggccttcggtcatatgcgttgaggtattggggttgatgatcaatatgctgtaatcccgttccccttttctcggatccagctggatgatctcgtttgcgtcatatcgcggctcaagaatgggactcatttttccaagaatgaggtgaattgaatacacttggctggaaagacaactccttgctctccgggaaaaaaatgtccgcggagaccgcaaacagctccgttatcggttatcggaccctccacaaccccaccatctcctaggagcttagcggactacttctccaaaagtcaatggcttatttatgcaatatgcttcgtggcttcggctattacatgccgaacgagctaattttcttatctaccctctcaaggaatttattcgttccaaggttatcaatcgaaatggcttacaaatccaattgtgccaccagccctccggctctagcactagtataagaaccactccacccagcaaccccgccgtcctcgcacgccatcctaccttcaacacacctcacctacgcagaggaaatttcaattcccatcatgcctctgatcgcacagcaactccagccgagagtgattctcgggttgatgacctttggcccaaccgaggccaaggatgctcgtatcacgtcactggatgagttcaataaatgcctggactacttccagcagcaagggttcaatgaggttgacaccgctcgtatctacatcggcggcgaacaggaggcattcacggccaaggcgaactggaagtcgcgtggactaactctggccacgaaatggtacccaaatcagcccggcttccacaagccggaggtcgtccgtgagaatttggagctttctctgaaggagttgcagaccgatgtggtcgacattttctatctgcatgcagcagatcgtgccactcctttcgctgaaactctggaggctgttaaccagctgcacaaggagggcaagttcgtacagtttggtctgagcaactttacagcctttgaagtggccgagatttgcgtcctttgtgctgaaagaggatgggtccgtccaacagtctaccaggccatgtataacgctattagtaggtggtgtcctttctcttgttttcggtcatggccactcggctgacagagtgatagcacgtaacatcgagactgaactcgttcctgcctgccaccggtacggtcttgatatcgttgtctacaacccactggctggtggtattctctccggaaaatacaagtcgcaagatatccctgcggaaggcagatacagcgacgcgggctctgcgggacccagatatcgcaaacgttacttcagagatgccactttcgaagctttgagtatcattgagcctgtcgtagagaaacatggtctcacacttgtcgagacggctttacgctggatccgccatcactctgctctgagaatggataatggcggtcgggatggagtcttggtgggagtcagcagcttcgagcagcttaagactaatctcgccgatctccagaagggacctctcccagaagaggttgtgcaggctttggaccaggcttggttggttgccaaggccacttctcccaattactggcatctagatctcaagtatacttatgatactcagaaggcggtgtttgggcctaagtgagagaaaagggaatgttaagattttccacaaggtccttatatgaatagtacatagttagtgagcaccaatgagaattcgaggaacttggatgctacccaatgagcttcatcgtcctttaaagatcggagatggactaagaccaaacatttgacaatcgtggtcagattcttcatcgttgggcaatatatcttaatacatatcgcatcgcaaacgaattcgcagaccacgtcttctggtctaatccaggggcattgcctgcctccaaatccaaaaatagccgaatgacatgcattcgctaactcgaatccggcatagcgtgcgccacgatcgaaatcatgtgatctggtcagatccagtgatgatgacacctgaaagcggtcatttcgatccgcctcatcggattcttgaccatcttcaccccgagtactctcttgatgcaccttgattatttacgatgcaataatccctactcagtggattgaacccactattcgagctacaactatccctgatcggtgccgagtcgcatatccgaggttgtgcagcatctattgaacacgtggaataggcttcatgggtaaccttttctgaaataaatctaccctcgttatctgcatcatctggatggtggccttccaatagtccacgcattggctccttatacctatatctcgccggcacagtaaatcggacaagaacacccctgacggcggtattcatgtcgaggtagttaggccgactagcaccttccctcaccatcgccgttgtggcttcggatagctttgagctctcagagccgcgggtgacctcaaccccggacgcagtccacgactccgactctgacgacgaaatggttgtcaatcgccccccattacaccgtccaaccgacggccgctcgcaacagcccctcctcaaagatgaccgtcctcgctcccgcccgcgctcgagcttcggtaattatgacacagaaggccagcccatgctgcatgaatcacgaaggccgacaatccggagtaaaagtccggaacgcgacgctgccctggcaacccgcaagaaatatatggttgcatcggggttcctggtgctgagtctgattagcttcgtggtccaaacggagaccgcttcatacattcaaaatgagttgcattggaagaagccgtattgcatgctgtaagtccgagcgcaaagatagcgacaagcccatgcggaacctcttttccggaatgtaatcgcttaccatttcctttccctatgcagctatatgacccacggatcgtggtccttgctctggctggtccagctgggtatccttcggatacagaaacggaagctcacgtgggatgttttctggcggcgccatgtctttttccttcgtaccactgcgcagatggtagaatcgcaggaagtacatctgagtactcgcgcgtccaatcaatcgccggtccgctatatgctgaagaccaccgcctttgtgactactgctctcaccgtcgctggaggatcatggtacgtggcagtcaacatgaccactcccagcgaccttacggcgatctataactgctcggcgttcttcgcatatgccttttcgattccgctattgaaggagaaactccgaattgacaaggtcttttccgtggccgtggctaccatcggcgtcatggtcgttgcctatggggatgggcctcataagaaggtcccgaaaggaggcacggatggcaacgggggacagaaccgattggtcggaaacattgttatcggcgttggaagtattctctatggcctttacgaggttctctataaacgctttgcctgtcctccggaaggtaccagctctggccggggtacgatctttgccaatacttttggcagtctaataggggctttcaccctgttggtactatggatcccattaccatttctgcactggacaggatgggagacatttgaatggccgactggcgaagcagcatggatgctgctcatttccgtgggtgccaatgctagtaagtaccacaccagcgttcaaagcagacacagaagctaacactaagatagcgttctcgggctctttccttgtgctcatctccctcacatcgcccgtcctatcctcagtcgccgcgctccttactattttcctcgtcgctctggtggactggttccgaactgggaactcactttctctagcctcgattattggaggcgtcttgattacggtggcatttttcatgctgagcatcagcacgtatagagagatgaatgaggagcggaagaagcatctagagaacgatgagatcgagtctgacagtgatgcatagatggatccacggaggtgtgcttcgggatgttttggcatacagcattgaattagtattcagcgtttctgacgtataaacttctaatcttttcacacgctatacttgcttcaagccctgtagatgcgcttaaacttcggccctataattggggctgccccagattagttccatggttcagtgttcgatgtatcgacaaagacccaactgtgacatcatgaaatttattccgatcattcaactcgggtatgtccgagtgagtttttctttacatcgagccttggaaggcagatgcgtttcccgtggatatggatatcggcatcccgcacctccggactttaagattaatgcaacgtactcgcatatatacttagccattgtatgatggcgaatcagatccacagcgcaaattaatattcaatgatcatcgtgatagtcccggtgcttataatgtatttatacatatagagttcttctgaatgtaaattactccgtcgtgcagtaaaatcaagaaaaacggtgagcaacaagcgcgagctgctcgacaagtcagcttttaaaggcgtggtatagatgcatatgcaggccatttcgagatccaaagccaggatcagccgccccaattgatttcgcgatgatcagccacacgatgcaattgcaggtccgtccccgtcaaagctgtcattgttattgggctaaacaaagaaactggtccaccgaacgctagggggggataatgtctcacagcgccaggggagtccgtttgtccgtttgtcttggaagtaattttcaccccctgttaaatggcgctaagatatgtctggcgccactatttatatccgatctgcctccacagccaagacaagcgatggagagtgcaagctcggtttcgactctggcaatctcctggcattcacagaggaaatatgacttcggttagacaatccacgagcaattcatgttcatgcattcgttttcaaggcccggccctggctcggcattcaacaccgctcccccgacaatataatccccttgacttgcagcccccccagcgtggcgcactatccatccgggacccaccaggtcaagcgagatttggatggtcacttagaccaagtgattggcagtgacaatatccacttcgtttttctccggatgcgccgccctgttgattggtgccttgaggaccccaggattgaaatacctaggtgccttgattacaggaacggtataaagtacggtggatgcgagttgaaccacttttcacgggagcaccgctaaccttggacttgatacgggtatggtggcaactacggagtaagtcatgacgtcctctacttgaagatttgaagatattattcaaagtgaatagtaatagttatagcgaaaagttacattcctcagagacagccctgtccttttgacagatgtcaccgaaatgtcttacctgcatactgtattattccttcatatcactaaagcagggttaatttaccctggcttgcgtctaggcaactcctaaccatcaaccataacttcgtatgtaatctcatcgctccaataatcggcggtgattggtttgccccccggatggcaacgggtgataccgtgtatggtaagtaacttacagctccagattcgcatctaggtttcccccctcccggatttgttgttctctttggcttcttcctcttcaacctctctacgaccaccttttccaccctcccctctttggccttcgtcgtggccgtccgttcattttccatacttttggataccggtggtcgcttcaatttgatttcactcgttccttttctgcctggcgcggattcaatgaccctccaaggtgcttgagcttgacctccagattcctagcctttctcttgctgaagggaaatcggtctggaggtcttgagcccatctggatcttattgggctttcgtcgtcactccgctaaatttctttattaccgcaccttttttttattttatttttctctcctcttggaatcatggcttcgatttcacttcctccgcagtcccaggcgggcttctcgccacatttcgatacttcgaaccactccaacaatcccgatcccgatcgtcaccaacacatgcacgcaccattgcctaatcccccattcgtttttccagcacgggaccccgatgcccccacccaatcaaacccccctgagcgccgggaacgagccgcattgcccgcattctcttttaatcccggatcggaagagcagtccccacacctttcagcgccctgtttatcgaatcctcgcgcgggtggacaccgtcggcgaccgagtgagtttgttggagacttcttggtaacaccggaatcagttggaccaggtcacaggcgggcggcttcgatggcagatcaacatattccacccccaggaccgggggttggtagagttcctggacgacggaaccatgcccatcgccgttcggccgccatatctaatgtcgacttgaattccatcaccaaggcgcttggtcctaattctgggacaccaagtgcgccttttacacccgccgaacctaaccaccaatctccatccgatcttccttcccgaacgctctctcaatccgctattactctcggtcgtcccacgccgcctgcgtctccacaattccctcccgttcctcctgtaccttccattccggtttccattcaagtggaaatggccttggacaaccagaattcgaatgccgaacgaccagtctctaccgtttcgcatggtatctccgatattgctacaactaagtcacaacaggtggagacgccgactctctcagatcaggtaacaccaagacccgattacgaccgaaaacctcgaccaaaaaccgcggatgcctcttttgtcatggattttatgcagatggatgacgactccggatctatcaaacgttcgcactcagccgctgggcactcccgctctcgaaagagcaaatcaacaccgcatctcgattctactctctcgcccgatgatattcaatccgcagaccactaccggccttcattttctgacactggttccgacacatctggcgatgaagcaactgagcattcgtccgacaacaaatcccctgtcaagtcgaaaaagaagaagcagaaacgggttcgctcttgggccggtcacattctgactcgatccaagagcaagggtaagggtaagcgccatccaaaggttcacacagaggaggagccgcctgtacctcgcgctccagcacctcgtccacctgctcttactcggaccgtctcgggcactggatcggttttagatgttgattttgataatgacgtcgttgtcatccggactccgaccaatccaacgatgccttcttctgcgcttcagcccattcaaaataacgataccgatggttgttctttgcctgcccagtctctagagagctcatggaaaccgaggagtttctatgaacaggatgttggctcccacgacaatgtactaagtagccctgtcatcgacctcgatgctgcgcttggtcctttcaacactccagatatgcgacaaactactcagggtgcgcccaacaacaacttctcagttgcgacacagcggatgtacagtggcggaagacgaggtgaatttgtcggcccagagatgcggtaccatcggcgcacggaaagtgcaccggcgcttcaaccatttgaccgcactgctctcggcgcattccgtctgggtccgactccggcggtcgaaacgcccgatgtatttgacgaggaggaagaggatgctttcttggctgcttcccaatcgcccaagggcgagcggcttccggtgaacgcgtcaccgatcgacaacgcagttttctcatcatcggaggacgactcgaaatctattcacagcaacgctacctctggcagtagtgatactctgactcgtccccccaccggtagcgtctcctctcagaatgctggcttaggcattcgacaaggcgataaacatctgagccaggaacaactggatgacagaagtgtcctcgagcaggtacacaatgccagcaatcctttcgccagcaagcctcgaacccccgtggaaattctaaagatggaagaatctgggcacaaattgattggacccccaagtcccgacatttctcctcgattcctagctgtcgacaagcgaccagcaacctcacccatggagttgctgcctagcattccgcccttctctttacaaccagggatttcgccgtctgactcatctttcccgtctccagatgcttcgcggtcaattgcggcatcctcaactgaccggaacttttccagccactcatatcatcagcttccttcggctgaacatccttacgcatcggttgaagatgttccatctttgaccagtagtgcatcgaccatgaccaacactttgaatcgtttctcggcggcttctttctttccccgtgggcgtctttctgatgaccgcgcagcgtccttctcagcttccggtacccgacgcacaagccaggctaatgcctccaaacgctctagtctagctagcctttccaagctggtcgtcggtccccattcggagcggagtaagctcaatcaggaggagaaaccccctagcaactcatccgacaaaacgaagaagaagggccgccgtctcagccgaatgatgcacttctggaaacctaaggacaaagaaaagtcatccaatgaggcggcaccagcaaacgaacggtcgcagtcataggcgcgcgttgcgtattggttttgatatttttttttcgatttacggcgcaacctcggcatagcgacatcctggcaattatttttgagacatcacttcactccccttttcttccttgcccgcttgcgatagcgtgggcgtcttctttcacccgatttgtacatattttattcggttcagctttactgtggattctttttcttcatcttcattggcggttctatttctgcgtcctccacctagacgctcattacgaatttccttgcctctcaagatgtatgtgtcttgagtatgatctactcttttcttgtcaatccttatgttccggtgtgggtgacgcacggatttattgactctctctacgatcgttgctcctctcaggactttttttaccactttgtttcttttgctcaagggtcttggcctgggatatcattcgtccccattggaacatccattgggtccttctttttccatatctaggacatggctatctgtgtatctattgtgtggctttcgtgtcttccactgttcaggtgtggcattcgtcaagaatttgtctctgtccgattacacagatcgcggataatgaaacactctcttcaattatatgtcatagtttttgtaagattgaatgtttatttcgtaggtttggttttaggacaatttgaaatgttgcaaagcacacgtagccctaaactccaaagatataaatggaaaccactacataatcggaaggatgtgacgacatatatacaaggagatgatgctgtgatttttcaatatatattgaacatcggatatatcccttcccttaatgatctgaatccctcaaaggacacagtttgtgcacaatgaatcgaatgaaacatatcttacctcactttcgagcagatgggcacattatcgtgatcgtcccaaaggatttgatatagttattgctggtgacttatcccttgtaggagtagtagtataaagtaccttttgtagaagctcatggagttaaatatagaaacataggagctgttgatctgatctgattcaaagctagaagatctgttcagctttgtgccatggtcgagtttctagtaaaggctgcaaagaccgggcggtgaatgagtctagttcatttactaaccatctcagtcgttcgaatcacctaggcatcttcatctgttagctttgcaacattctgcatgatcatacgacctggctgtggaggagcttgcaatgccattccaggaccagaatgcgaggctattcggacttccatgttttttttcccttttggcaacctccatgacttggaagttcgcacaaatgatcaccacttcgaagtctcaaattgaagcaaaagctatggcaaagagtcaatatacgaagggagtgcccaggcacaggcctcaaccctggatgcccaggtgcatccaccgtcttacctaagctccacgcgcgggagagcttgcccacgggtggacctgagctctccccccatagagatgtcggatctgcaaccatcttgaagctattcaatacattcatcattcagccagttgaagccgttgaactgctatttttagaccctgctctttggcttcaaactgtgcgcctaaaactacttccagcgactctgctagggttgttgaacttgtcgctttcattctttgcgtctccactaccagtgtttcctacactttgagtgacgtcgattgaattttatgccttttctctgcttgaaatcacgaattgatcgttcacgtcaataaaccaatccagcagcacttgatactcgatctacacgtgtcatagtgaaactcccgttaaacacaatgtctaatggcggtgattcacagagagtgcctatgtcccaagacgaacagtctctttatgttcgcacacaagagtacgcagctacgccgcgatacccaactgtgactagacctattgggcatggcttctacgggggaccagacatgattgacgatgacactgtaatcgtcgaccagaaaattttagaccgcgaatcccacgagtttgcagagggcgactttgtttgcccaggattcttcaacctcgtcgatttaggtgggttcacccgccgcttcaacccctctcaatggaaatacgatatgcgtcgccaggcccagtccatccttccattcttatctcttggcccttcatcatgtctacgtgatcccgaatacatccgcaaccaagagttcacactaattcttgctattcgaaaccggtactctgctcacgcacgcctcgtctcaggcgagaaggcggccgccatggtcggtatcatggcagacacgattgatgttcttgataaccaagagctcatttctgcattcccacgcgctatccgccgcatcaatgatcacctggctggtgtggatgtaggacccaatggaacggggtcagccagctatccgaaaaggaaagtcctcgtcttctgtgaatccgggaatgaacgctccgctgctgtggtcattgcctatatcatggctatgctcaatgttctgtctgtcgaagccacgcacatgattcaggcgcgtcgtttctgtgtttcaattgaggaaaatatgaaatacatcctcgctactttcgagaccattcttgctgctaagcgtgatgttgagcgtgctaaaaaaatgactgttcatggcgctgcgagtcttgcgccgccatctctgtcgccaacgcttacaaagaagcgaagcttccacgatcagagagatgatgatattgccatggatgagggtgaaatggatatggatgaggatgaggacgccttctatgaccgaaagccgaatgctcccttccaggaccgcgtagtctagggtgagccgaggttgtttgtttcgagtatctttgggatgtgaatggcactgtcattcatggagatggggagggagatggatacgctgaaagatgaaagggaatgaagggaattctttacattgggtagagtagggtgggtatctgcttttctttttatgtctgctttgttgtctgctttattgcttcatggttcttgtgtgcaaatacccagttgcagttgctcattctactatttttccgacatccaggtcattcactggccattgcattcttataactattttcatattcgtaagagcatacacatggcaagaattcagtctagcatacgtctacagatttgtagaaaaatcaatgatggggtcaatatcaaaatctggcaagtctcaagacacgcggaagttgattgccctcaagcatctgacccagcgtttgaactcaccttgtcgattctcgactcaatttgcccctaccttgtgttttcctttcaatctgagagctcgagtctcgcactgattttgcgcgacttcaaagccatcccaattctcccttattctctcttctttcatctcgcgcgacaacctttccatctcacgatcatcccaccacgatcacccatcgcatcctacgatgaagtgcatgcttcacattgacctttagcacgtacctaccatcgatacaccccagctaaccatcaatcgcctcacacctcgtcccccacctcgctcctcgccccaacgcgccgccaaaatgagcagaatgcgactgcgcgacagtatccgcgcgccagtgcgatatggcgaggacgaatacgaagcatcgcgggtctcgctgcgccagggatgcgatgactccattgacgactcgatggagcttggggaaacaggtaaaccgcgcccacaacaggggcgcaagccaaacactgtgccattcaatcccaacctgccacccgctgcgtttcccactttgaacataccacagccaggtcgtggctcctccgtctcggcgcataatcgcggtgttggtggcagccggcagaacgtacacgcaagcgaagctacatctgctttccgcaatgataggtcggtcccgtcgcctccgtctggaaatgaagaactctcgatggacgatatcgacaaccaccttgccagtaacaacatggacaatccggtgtatgcgaggaacgtgaatttggcgcgcatgagtgtggatgcctttccgggttccgaggacattgacatggacatggccacctccccggatagtgatgacgacccactgccagatgcgactcaggtgctccttgatacggtaagtatatcgtgtcttttgctgtgttagtacaattgaacgagtctgatgtgtgtcgttgttttagatcccgaacccaaaatggggtgatctgcacaaggctatgcaagtcgagatcatcgaaaacataatgaagtttcatagctggagacgtgtttgcgaccttcttgggcttgggctagtcgaacgaaggcagctcatgattaacataggcattcgcaataaacagatcgaaagggagaatgaaatactggagaaaatgcggcacaaacagcgcagggcgcttatgagaattgataacagcgacttgaagcttttcaagccgccacctcagttggtgctcaaaaggatcacccgagaggcccatcagaacctgttggtcaccggctacacggacctcttgatgtgtcaatcccacgagttcttgaaagccagacagttcctgcatcagcacgggctacctcgaagatatgctggcgattggggagacagcctggtggtgcttcgagaatccggggagcactcccatgagcccgatgagttcgaatggaaagaaaacctgagagtcactccacctcccgatgagaccgaggacataatcaatcctttcatggacccagccagtagggctaagagccaattcattcaaagcattggtatgcacggcacaataaaccccagggatttaatcaaacgcgacactgacccggctcccatcgtcgactggggaaagtattataaacggaagccggacttgtcgtgggacaccacaaagccccagctaaatggattggtcaaggtgaaggtcggtccacacaacgcggcacggatccaacattgcacggacgccggcgtcgagctccaaggactgtcctcccagacacaggtgaccgccatgccaggatcacttccgcaggggtccctacaagacacaccgtccaaggagccgcggaatgcgagtctcgcccagccctttttcagacgacctgctagacctttcagaagagtcctcaccgactggtcttcgccagttccccaccaatccgagagccaatccaagtatcgtcgagacatacagcaggctaagcttgagaaactagaagcaaaggcagaggggctgcgccgtcgatacaactaccagccaaacctccaggttaagggcgttggagttggaatcagtcccgcacgtggaattattcagatgatgcccccgatgcagccagtcgaggaagagacacattcgaaattattcgcccggacgcaccgtggaatgacaaatatgaacattgaccgcctcatggatgagtttatcgagctgcccgaggaaagcgagcccgagctacctgatgcgaagccaacttccactgatatcagctccaccactgaggtgtctatggatgatgtaatgctggtgccgacggatggctgttcctcctctccgcagtagagggatacaaccacgagatatggaacaaacaaggattcaaagatatgagaccatttcttcatctgaaccatcttacatggttcctttatgtaagattaataatgtatgattgtcttgaatgatgttgaagtgaaatccgtagttcctggacgtctaatctaaacctggtccgtgcgtcgaacgcgaaatgccgcgttgaggacgcgctttacttcgatttccgatatatcacaaactgccgtccaatcgtgcgcagttttcatccaatctacgagtatccatttgttggaaactcgtacatacaatatcccttggtatcacattcgtttatctctcccctcccagcgcaacttgacgttgcgaaaacttctgcacccctgcgaatgacgtaccatctccatccatctagtactcgctttagatcactcacgctctttatattgtgactcaattctatcagacagaatgtctgttgaagacacagctactcccacggattcccgtgcggggactacggcgcccgaatcggtcattccttcgtcgccgctcacagacccaactgaggctgactcgaagtcttctcatgataaagacgacaaatctaaagcagatttgaccgattcagaagatgttgaggggatggatagcaaggccaaggccttgatgcacttgttgaaaaccagctccgtatgtccaatccatcctcgtcgtatctcatcaaatagtctcatatcttctcgtacctgcaggtctttgtcgctatcatgtcagataaaatgaagcagcaacaagaggacgcacgcttggcagcgatcaagcacaacgaacaagctgccgcgagtcagaaaaaagccaagtctcatgctgaatctgctcgccgaaccactcgaactcggccaactcaagatgcgatggaggagaagacatcctctagtggcaagggcgccaaggaaaagaccacaggatcgactagaggtcggcctaggcgggcagccgccgccaatggcaggcccctttttaaattttttcannnnnnnnnnnnnnnnnnnnnnnnnnnnnnnnnnnnnnnnnnnnnnnnnnnnnnnnnnnnnnnnnnnnnnnnnnnnnnnnnnnnnnnnnnnnnnnnnnnnnnnnnnnnnnnnnnnnnnnnnnnnnnnnnnnnnnnnnnnnnnnnnnnnnnnnnnnnnnnnnnnnnnnnnnnnnnnnnnnnnnnnnnnnnnnnnnnnnnnnnnnnnnnnnnnnnnnnnnnnnnnnnnnnnnnnnnnnnnnnnnnnnnnnnnnnnnnnnnnnnnnnnnnnnnnnnnnnnnnnccgggggggcgacccgccgccaatggcagctctatttctaattatttcaagaaggccgacgtggaagtgactgaagacaatccctcggtgcagcaagcccttgagaaggctgcagacgactacgaagcaaaccccacggctcttggtgagcagcacttagtcgcgacacagcagccagcacttgtgagcggtggcaaaatgagaacatatcagttggagggcctcgaatggctcaagacgctatggatgaatgggctttgtggcattcttgccgatgagatgggccttggaaagactgttcaagcaatctccatgattgctttcttgaaagagaagaatgtttcgggtccgttcttgattgcagcaccgctgagtacggtgagcaattgggtagatgagttcgcccgatggaccccgggaattaaaacgatcttgtatcacggctccaaagatgagcgagctgtcatgcgcaacaagcacatgaaaatgaaaaatcagggagatatggacttcccagtggtgtgcacatcctacgaaatctgcatgaacgaccggaagttcctggctcaatatcaatggcgttatattgttgttgtacgtttgtttcaatccctttcctttacaacatttacacgacactaatcgatttataggatgagggtcatcgcttgaagaacatgaattgtaagctcatcaaagagcttttgacctataactcggccaatcgtctattgatcactggaacacctcttcagaacaacatctcagagttgtggtcacttttacatttcctgcttccggaagttttcaatgacctcaactcatttgaggggtggtttgatttctcctcagtcctggacaacaagggccaggcaaatcttgttgaaaaacgcaagcgtaacttggttactagtatgcatgccatcctcaagcccttccttctgcgacgtctcaaaacagatgtggaaactaccctccccaagaagcgggagtacattttgtatgcccctctgactcccgaacaaaaagatctatatcgggagataatcaacggtacagggcgtcaataccttgagggaaaagctttggagcgactggagaataagagcggcagctctacgcgctcgcaaagtatgaagcgcaaacggagtagcgatgatacaacgccggtcaagagcgccagacccagcgggacatccacgccagctagcaatagaaataattctagccgccgttcccgacgcaatacgcgtcagagttacaatgatctaagcgaaggagagtttgatgagcacctccgcaaactcgagctgggaattgaagtagatgaagagcaggtcgatcccagcgatactgagcttgaagagatgcagcaggctgagaatctgaagcttgctagtacgtcattttcagatcattttttggtttttgctaatattatcttgcagagaaagagattgggcaaaagaagatgcaaaacccggttctgcaggctcgtcttgcctgcaattctccgcacaatttctactggccttggatggacgagtcctcttctgtagacgaaacactcgtctccgcctctgggaagatgcttttgttggaccgtttggtttcgtgtttgctgcagaagggccataagatcttaattttctctcagttcaaaactcaactcgatatcattcaagagtgggcaacaacccttcggtcttgggagtgttgccggatcgacggcgctattgcacagtcagagcgtcaggctcagatcaaaaacttcaattccaaaaagaatcacaagctcttcctcctgagcacccgagctggtggccaaggaatcaatctcaccgctgccgacaccgtcattatctatgattctgactggaatccgcagcaggatcttcaggctcaggaccgagcccaccgcattggccagaccaagccagtgattatctacagattggcaacgaagggtacggttgagcagacactcctcgagaaagcggattccaagcgccgtctcgaacgtctggtaattcagaaaggcaagttccgctccctgctcgaccccagtgcgaattcccaggatatcgaagaactgcgcaaggttcttggcgagaatgaattcgagcggttcgacgttggcgccgaccctgcatcgatcttgtcgaatgaagatcttgacatcttaaccgatcgctctgaggaggcttatttgcgtgctgagaagggattggatacgaaaggggatgcgtttattgcggttgaaacgaagcgcgatcctggtgagagcatcctttcttgagatgtttaatggctgtctacattatttcttctcttccatccaagctacacgctggatgatatctagaggttactggatggtacccatatctattggtcggctagctggtttggttggcgtttacctacaaggtcggatgggtggcttattcgtgtatgttccctagtctagatacctagaccattgctattataccgtatgttcaattatttcaatgtttacactcggcaataaagattatgcagtgccatttatatagagtggcataaactcactgtagtgcgtaggatggaccataacttgagccttagcggcactatagttacatagcccccattccatagtcagagataaagatgcaaagactatccatttgacgcctgaagctccctaacaagaaaatggctgtacatgatagtcgcgagaatcaagaaggtaggacatatatgcagcgaaaggggcaatggaaagaaaacaagaaacaaaaagtattaggccaacaattccgctagtccacatccacagtagtcaatcaccgccgagctttctcgtcctcaatctggctgcggagatccgaaaggacatcatgccgttgggccatatgtttcttcagcccttccacctgttccccaacagccttgacatcctcccggagtcgctccaaatcctgaccatccttagcacggccagtgccctcacgcaactcgcgcaactcccgctccttatactccaaaagcgagagtgcctccttcttaatcaaaacccagttgggccggccatcgttgcgcggcccatcccgcctagattcggaggctttattggcggattctagcttcttctccaattccgcaagctcgcggcgcagccgcaccttctcccactcctcgtcctggatcgtgtcgctgaaatccgttcccttgggctgatacgagcccttgccaccaacgcctagacggccgaggtaggtatcgccgaacttggccttgcggcctgaccgtgtttcggtgtcaccgtctacgccgtaacgctgtgcgggtcgcgccttatcaacttggtagtcaatctggttgtgctcgaatgaggcacgcagcgaggcggggatggtgcgtgggatgcggaaaccctcgtggcggaagttcaatatgtgcaggaaggcgagcgtcgcatctttatttatcgcgggtgatgcggaggggttgaccaggttccaggcggagcggacgtccgtgtcggggacgtcgagcgattcgtagagcggttgtaattgttggactggggtctgtcagcggggtatttttctgggcgcgcacagcgcgctgtaagggctactcacattctatttggccgcgcgcgttccggttggcgtcgtagatctcggcatacttgttcttgtcgtcgggcttcatataccaatcaaagccgtcctttaggccgagcgagtcgtcctcgtcttctatccgctcgaactgctcctgtccgctgcttagtgcgcgggtcgcatggacgagatgtgctttggactctggaactagccaatctggcaggacatttgggacatcttgtagttcctgtttgcagataagacttgtgttagagcgatccgataattattcaggaggatggatcacttacaccattcactaagtcgaagactaagcgcattgcaacacagaactcctcgaaatctagctctccgtctccgtcgacatcggcaatgtcccagaccttctcgagttgatcatcgcgcagccggctgttcctcagcacggaggcggcctgggagctgttgaggtgtttttgaccatttgataatgaggcgaagatctcccaatatcgctcaatctcccattgctcaatctttttagtagccatgatgtatggagctccgataaacgtggtagaggatgaggtgggaacaatggggggagagactcggatttacctacttccgtcaggggctctgaggtcattgggctcacaatgtatttatccttctctgtagtatttatattgaaatgtttatcatagttttcacatggatatctattagaatctatctgttccttgcattatggtacatgatttcctgtgttgagtaggagaactcgttatcctgtcctcacgtagcgattaaatcttcggcgtcatgaatccttcttctcgtctttgttctcttgtttagtcttctctgcagcctcgagtcgctcaccgacttgaataatcgctcgttcagcttccaaaacaagctccggcgcttccaggatcgtagccaacttcttggcatcagacatcttcaacaggacccgatcctcgctctgctctatgtcgtcggcaacctcggaatatgatggctcggtcgcggaaccttccagtactccagatacgcgtttggcatatagctgttctagccccggtaatgagatagggttgaggatattctgtccgacgagtaattccaggtgttttgaaccattcaatgctgtattctcgtcagttttatgagccatcgcaatgtggacgatcaaaactaaccgcgccagtgggaccagccccgatatgccaagtagaaaaagggaatattcggaaccctgctctttattagtataccatatcaccggagaaggctcatgtctttcacatacactggtatcaatccaagtggggcggtaatcggcgcagctattaagcaccacatcatcttcttccgatgaagctcctgtctctccgtggcgaccgtgcgcagtacatcttgaactcgctccaatcgcaccgcgttaccagggaacagcacatccaccttagtcttcccatgatccccattcactcgctgttgggtcttgaatgaaggaatgcttttgagggcccattcttcgtatggtatccgttgctggactcgattgccccagcgaacaaggtgcatcttccatcctttgtcggcttcctcccacttggcccatatttcagccgccttggttgtgatcctatcaaggaccgacagctccttcgctaagtccttgctaaggggccgagcatatacgagaactcgctttgtggagatcggaattaggaacaggcgcatggtggtggatgcctaggaaaattggcaattggcactcaacaatcgagaatcgcttgatcgcgggcaagataattgataggtatccaatagttattaagagatactgtggacgacttcgaaattaaacgttcattgaaacttgatcctgtttttcgtgtgggtgaaaaagggatgcgggagtaagcaggcctggaggtccacgcgcataaatccagacgtcatccgaggtccgcgtacactttggtttcggtccctgaacactttaacttcatacttgaacaagaaacaattggggattcgcgggcaaactattgattgaagtttcccgcgactcccgggtttcagctttcaatttctgtcctgtattatgcacagctccaaagacagccctccagggcggatcattggtgacaagctgacagagaagtgttcgcccattccagaggcgcccctgacatcccagcttagcattgagactgagcccactgttcacaataaagcttccgatctatcacttgcgcatacagatggccagggccagacagcggaagagatcgcatactcccaacgcttcgccttgcgatctttacctggtatggttccatttaaagctcaattcgacgatcactcactaatagcgagtctttatagcctggattcgctcggtcgacgaacccgaggaggacggagataaagctacggcaaacgatagcttactcccttcccaaccaaatgacgcgtgtgtcgctcagcacaaccattcgccctactcgtcctcgaagccgaaacctaaccacacgaccaacaatggcctcttcgtggaggactctccaatggtcaaccgtgaatcacgctgggtgacattctcacgagcgatccaatacccccgaccgcccggtagagaggaacagcatgtcacgtcagaatggctgaatgagaatcatggtgattactcgcaaccatggcgaggaaagcatttggagggcgatagtccggagtacccgctgcacagcggagggcgaagggagatttggatcacgcgtttcagaaacacgcttctgcgaagtccgatcgtaccgttgattcttcgaatgactgtctggtgcttctcactctctgcactggccctgggtggatcaattcagcaaatggctaatcaagggacacaccctcaaggcccatctgcattgatggcaattatcgtcgatgcagtcgccatggtttacctcctatacatcaccttcgatgaatacacgtcaaagcccttgggtttgcgttctccttctgctaaagcccgtctcctccttctggatatcttctttatcgtcttcgattccgccaatcttagtttggcatttgcttcactttctgaggtgacaggatcctgcaccgaagcggaggtcaaccaaacaatcgatcctcgaaatgatgggatatgtacgcgacaaaaggcacttgcttccgtattgctggtcgcgctcttggcttggcttatgacgttctccattagtgttctcaggtaagcccccctgtctataattggcatactcagtccattttctaacgctctgataggcttgtcgagagagtaacacagtgatttttgagccttgttgtgtttcatgaatcttttagctgttgattacatataccatttaagcgatacttgatattgcgcaggcgcaattttagacgtgcatggcagggccgtcaccaccatacaatggatcttgacggaaccacgccacatccttgattctccgcaactttgcttcctcttctggcctcccataacacatatcccactgttttccgagtggatatgcgcccaccatttggaactcttcctgattccagtgcaggtcctctaaaagtcgatgacccacgcccgcaggcacaatgataaaatcaccgcgctgtaccgttggctcaaatcgtccggggttctttccgcctccaaaacacagacgtgctctccctgaaacgaccccgagcacctctggcgttgtggagtgaaagtgggtttgggtgtacatgctaaacacccactgaggaacaacctcgcctactgcctccaggtgatcttcgagctctgtagctgtggcattgaaggccccatggtatatcatgagcggcttggattggatcgaagtgttcggtatacgttgccactcggggatttggcgagtggtcacttgaatgtctgactgtggagttatggccattgcgagtgattgtttttgctttgctcattctgcattggagaaatgtttggaggagttatgttgtaggttgggcggtaatacctcggcgcgcaggtatgacgtcatccttggtgggctgtcaataaagtacatagaacctcaggtatgtaggttaatgaccatacattctcctggctatatatgattggcactttttactactttcgtatttcgtacatactaatcatggcaatccggtgtggtgggctggctgcaccgatagcaaaattccatttgcaatcatactgattggtatcttatactctctataaagtaacttcatacaaaaggttagcgcagtatcgacttttcttccagaaatagttattcggggccgtgtttgtcaggttctgttgtatataattaaggcctgaaatcagtttcaccaatttatatgacgctattgtaaatgattttcattctaaacaagaatttcgctctcttttgcttagccgggcccttctgtgtccgagatgacttttcatccagtcgaatcctgcagcatgcttgacgaaaagaagatcttgagttggatatttctactccgtagatgttcaagtcactctaaaatacatatctttcttcaagcatgataattcttactagggttgatactagttgaatatatcttcatatttttctcctaactagtttgggagttaagatcgatgttatgattatgtaccttttgtatgaagttactatataaaagatacctaatttgcagccgtaggtgttagcttggcacgattgtctcaagatatgcgaatgtcgtcatttatttgtacactacaaagtacacacgtagactagacctgatcagggaacttgaaggttatagtcatgtattcccatctgtttctaagattctaagacagcagggtgcttcttttacagcctagctttgctatatgtctagaagagtttgaagtccgtactagtactgggtataaatatagatctatggatcaagtctcactagagatatgtgtcgtgatacagatatagagacaggtttattatagagaaaccaaagccccaatacatgtatatcaccacatgctaaagtatcgtctgataaagaaataataatctatatacttagagcatctagattcgctttgatcaaaagcatcaaagccgatgatgtagatttagcgggaaagctccgccacctcaccgcctgcggcaacaaggccatcatccccacgctggtcctactcagcctcatcatttctctgctcctgttctgccttatctcttttccaatctttgctctagacgttcccgaggatatcgtcttactcttttccctcgactgtctggaccccactcttgcaacaacccctcctcccaagcgtctaccctcattcgatcactcgaagatcctttgaggcgtgacttgtggcgctacaaccgtcttgaggtaatattcatgacgtgtaacctactggttactatcgagagttaagagcgcgttgctgacttagcggagtaggactctcggcctggaccactcaccttcttccgcatcccacctcccctgcaaccgcgatgtctcccgcgatgccgccggtacctcacaaggatgaccttgattcaacgtgagcagacaatgaattgggattttgcttcaatgcgatggtatggcatgagctaactgggttagttggacattcctagaagcaggaatcgagagcgtcatgctcaaccttgacgccggaatcgatatgaagaccgtaagtgaaatgccgaacgatccctgtcgatgagggtgtttaaaaaatagaagcttactggctgtttttgtctagtacatggctctgtacacgtgtgttcaagattcaacaccacttctctgacgagaaccacactcacacattgatattagggctgtccataacttctgcacatcccaaaaagcagtcgctagtggccaaggcctacaaggatcacgtgggggttcgtttttccccctgtatgccagttctcgatatgagctgacctggacccaagcccatctgctcggcgaggaactttacaaattactcggcgaatacctctcgtcccatctgaataaggtctacaaacaatcacagagccacaccgaggaaggccttcttggcttctacattcgcgaatggtaccgctatacgaccgccgccaagtacgtgaaccacattttccgctacctcaatcggcactgggtcaagcgtgagatcgacgagggcaagaaaaatgtctatgatgtttacactctgcatttggttaaatggaaaacggaatttttcgaaaaagtccatgagaaggtcatggacgctgttctgaatttgatcgagaagcaacggaatggcgaaaccatcgaacagtcccagatcaaagctattgtggactccttcgtgtcactgggtctggatgagaacgatagctctaagtcaacactagatgtctatcggcagtacttccagcagccgttcatccgtgccaccagaagctattatgaaaatgagtcacggcagttcgtggccgaaaatagcgtggtggaatacatgaagaaggcagaagctcgtctggaagaggagaagctccgggtcggtctgtatttgcatccagatgtcaccaagagcttgaccgatacctgcctgtctgttctcgtcactgcccactcaactttgcttcgcgacgagttccaagtcttgctggataacgaacgtcaggacgatcttgctcgtatgtatcgactcttatcaaggatcaaggaaggcttggatcctctgcgcgcgacctttgagaaccacgtgagacgggctggtttggctgctgtcgagaaggttgcttcggagggcgaaacactcgagcccaagttgtatgtcgatgccctactgcaagttcacacaaggtaccagaacttggtcgacgaggcctttaatggcgaggccgagttcgtgcgttcccttgataacgcctgccgagagttcgtcaaccgaaaccgcgtctgcaagacgagctcttctaagtctcccgaactgctggcaaaatatacggactcactgctcaagaaaggatccaagtcggctgaagagtcggagcttgaggagatgctggtgcaaatcatgacagtcttcaagtacatcgaagacaaagacgttttccagaagttctattccaagaacctcgccaaacgtctagtccatgtgagctctgtttctgacgatgctgaaacaagcatgatcagcaaactgaaggaggcgtgtggtttcgaatataccaacaagctgcaacgcatgttccaggacatgcagatttccaaggatcttaataacaactacaaggtctggcaggacaaagtactagaggatgaagaccgaaagaaaatgtgcgatgcccacttccaaatcctgggaactggcttctggcccctcaatgccccgaccaccccattccttgcgccaccggagatagtcaagaccgccgaacggttccagacattttactttgacaagcacaacggccgcaagttgacatggctgtggcagctatgcaagggcgaaatcaaagctaactacatcaaaaacgccaaggtgccctacactttccaggtgtcgacctatcagatgggcattcttcttctcttcaatgaaaccgacactctgtcctacggtgagatcgaaaaggctactaccctagctaccgaaatcctcgatcccaaccttagcatcctgctcaaggccaaagtcctcatcgccagccccgagggcgctaagcccgagccctccacttcgtttacactgaactacaacttcaagagtaagaaggtcaaggtcaacctgaacattcagatcaagtctgaggcaaaggttgaggccgacgacacacacaaaacgatagaagaggacaggaagcttctgcttcaagtatgtctcctacctaatcatcactccccacacagtctatttgtcctaaccttgctatagtctgccattgttcgaatcatgaagtcacgcaagaagatgaagcatgtacagcttgttcaggaggttatccagcaggtcaaatcccgcttcccgcctaaaattcccgacatcaagaagaacattgaagcccttatggagaaggattacattgagcgcatggacggcgatgaaatctcgtacattgcttaaatcgaattaaattccccttcccccttccccttcccgcccacttcctccaatattgcacaattaactcgtttctatttcctttttctgttgctctctgcttttgctactgtctctttccgacaccagtggcttcctgtgtccctttacccttctataccatcgatgatgaaatagcaccgcaaagggtatgggacctctgctggtccaggatagaactcctacaatggatagctagcggatagaatcaggctgataggagcatgaattcttctcattgtatcggcgacttatcttatgtttcttcatagcgctgagacgacaaacaaatgatgacctgattattttccttgcttttttgctcttcgctcttcgctcttcactctctgtttcttctcttttctgaaaataaaaaaataacaaaatacaataaattcatgattatgttctgcatagccggctattaggtattcgaagattaaaacaacgctgatcaatattgaacatcgtagaaacgttcacttcaatatttcattcagcggatcaatatgcgtagtattggctagacccagtgcgtccttatgtatagtcaagacaagaactgtgctagaatggatatgctatgcaaagtagagacgacaagagagacagagaacagaagaccgaaagtccatgaagtgctgaatcaccctagatgcgaaaaacgcaaatcaattccaggtcccaagtccagcgcactagttcgtaccagacgagtctttgctctggaccggatgcgcctcctctttgacagggagccctgtcgccaagtcctcaagcggtgtatctacctcctcgccgctcgggggggtgggctccttctggatctggggaacagtctcctcggtcttgagactcaaccctaggccttcattcgacgtgagagccacaggggcgaacccgtctgcatcaacggtatcctttccatcttgcttaaggttctcggtctgcttgtgcggatcataagccgggaacccctgtgacaggggagacttggggaagggagtttcgatagaatcggacgtggggacgtcttcgtagcgcttgaactcgccgctatcgcgtctgagtatgatattactccacctctttctccgactggtgctgcggctcagaccctccttggggctctcgttgccttcgctattacgcaggatggagcggcggcggccgcggtccatctcggctgtttgggtaacgatggacaagatcggggtggatgtcgaggtcaattcggcattgggagaggtacttgggctcggggatgtcacgcgcttttcttgccattcgcgccgcttttcgctcgcccaggtgccccacgagctaagatacgagccggctttttggctagctacgctcacggaggcctgagcctgtgtcaggtcgacggatgcccttgggcggtttgcgaaccaggaggcatcggagggattcggtgaagtgggtattggtgatattggggtttctttgtcgatggaggtgcgctgcgattgggaggcggctctctcttcggtgcgtttgcgttgcgcttcgcgcatagtctcgagatcggaccagaagctggtaaatgccgcgctcacttttttttgtccggttgagaagtggcggttcagagcctcgcgaccttcccggacacgctcatcaaggtggaggtctgctacctgttgtgcgagtcgtctttggacatcttccattgtcagaccgccggcgcttgggtgtcgtggctcagtgatggaaaataggagcgcatccgaagtgagacgtgagaacagggcgtaattatatgtggtcttccactgggtaaggaactctgtattgaagtcggtggcagggtctccttcaatgttgaggttttgcagctgggttctgctgcgagccgccgattctccaacgtcggatgggtagagctcctcgtggtacttcatggacgataataatgctaacaagtattcttcgaactgtagtcgaatgaattcttctgagcccataaagccaagggtattgggttgtgaaggatgttcctcgtcccaagtgtcattgacaatttgtgtgagcaggtcaatccagcgcctatcggccgctgagagaactagggcattgcggagggaaggagaatttatgacgatactgtcttcgtcaaggttaattagaatatcactgtaccggtccttttgctggagaagtagcgagtttgttgagccaaccacataagattttgtgccatcatctgccagcagatccagcagctggaggggtgtataggggccaaacatgcttccctttccgaaaatctgcaatgggagccccatgtatgccaacaaagaacttctgtcactcgtcttgagagatgttggtttctcaacagtctgagagtaggtgtcaaaagcaggatctgcgcagtcctgcaagctgttgatgaggccgggtattaaagaaataagcgaaaactgaatcatgcataggcgttcacagcgcgtcccgaagaaaagcatcttgggctgcaacagtagtgctttaaaaagaaccaaagtctgaaatttgaattcgtgaatcatctcccgtagcgagaggccttcataaattagcgaagcttcacacatatcggagaggatgatatccttacccaagttctgatctttggggccatcattcaacagagaaatcaccaagccctcgcggaatttctgtatccatgtcagcatttcattctatacattgccgcaactagtacataccttcaagatatcaatatccgagaagtcactgtttataacagtgccgaattagccagattccccattcaagccaggttctattccacttccatgccagcgcatcagggaagcaaatagcccaccgggacaagtatattccacataccgttgcgcgaaccaagccgaagtcaccacggagagcttctcgcgcaaatgacctactcgctgcggagtatctgtcacgaccacgacggccttttgtaccgttgaccgagtcacatcgggcgacgggttgataagcagactcgaatcaatctggcgggagcaggcgatgccgaacagggaggtttcaggcgcagtggatgtggcctttcggcagagtgtgaaatatgagaattcctcggtcgatctgcgatccgacgagttagtgggtttggcgcaaatcggcgctccttgtcgcgggattgcgccagaggagacaaagaagggaggaaacgagatgcgtgtcggggacaggggtatcgtacagatgtgctccgtcggatagggccatgaatgggagcagagaccagtcattctcggttgctgggtcggttccttcttcggcaatgcaatgctcaatttcagggccgctgtaggtgtttgtctcagtcagccaggttccattatgtccgtcttcgtattcttttcaacgatacgagttcggctctcgagtgtctcgtggctcaccgtgcatggtggaaatctatgactaagacaattgtgtcttgtttatgatggacagccatcgcgccgaacctcgaacggattcggtgcggctttgagaaatgcaattagaatgccgagaatacgcagttcaaatgaatggtttgcaacatgtagaaagtagctgcttctcctccaaaacctcgacgtaggtttcgtttcgcatgagactgagatcgtcgcaaacaggggaacatcgctgatacggttatcgcacggggagcgggcggtgagggtagccccgccaatatgcaacacaggtaggctaattggggaaaagtgatatactactagtagtaggtaactactccgtggtgttgaggaaataacttagattgcgtagatatttcaaaggattataggttatgaggtgctccatcgctgaactgaatcagattccccgtatgatttctcttaatcaccaaccaattcttgacgacgccggaagagttatggacaaggatttccagaaataaaaaaagaacaaaatagaaaatgaaaaataaaataaaaaacacagtgaatacgccagcttcgtagcacccttgaacagaaatagagccagacttcaacttttgaaactggaattcaatggcagaagagcgtttcttgggggagggggggggaaggtctcacgtcaaaaacattatgcgaatgcctgtccagtagcgttgccctgtactgcgccctgtaccaaggcttgaccagcctcgttgccttgttcaatgttgtggaagtcgaggatttccgagtacctagggtggaaaattagtaaaaaaatcgtggccggtaacatattcggaacgtacatcatgatcttccaagtatctaccggcaaatcggcatcattgaacgaccaatcgaacttctcttgtgcgacaggttcgtcggtggggtcatggtagggcgccaggtactcatgcgctaatgcttctgtggcttgaatgcgctgcttcgggttgaaaaccagcatccgctcgagcaggtcaaccgctaaaaaaacaagttagcgcattgttcacaactctatggtgcaaactatgacgtaccatcggcatcggcgttcttgaatttatttgcgaggggttggcgctcgcgctttggtagtgacttgacaaatcggagggtctagaccatatattagcatgttctcgtctttctaaacaaagcataactcacattctcgctgcagatagtctggatcacgtcctcgggaggagtaccgagcagctccgtaatgatcgagaactggttgacatggtcctttccggggaacagcggctttccttccaacatctcggcgaagatgcagcccgcgctccagatgtctacctcgacgtcgtacttttgccaggtgagcatgatctcgggcgcgcggtagtatcgtgttgagacatagccggtcatttgcgggtcctgaatgcgagcaagaccaaagtcgcagattttcagatcacagttctcgttaatcaggatgttgctgggtttgagatcccggtggaccacaccggcggagtgaacatatttcaagccacgctataagaacgttagattccggtgccccgggtattattcccgtggaagtcttaccagaatttggtataagaagtactgaatgaattgcttttcaagagggcgcgaagtgagaagtcggtggaggtcagttcccagaagttcggtgacgaagtagctgtagtcgttagtttatactgttcaccccgctttgtaggtaagggggacatacatgtcttccaaaggcgaaatgaaaatgtcactcaagctgataatctgtgggatgtcagcaagtaagactagtccatttatttgacggagtacggacgttctcgtggcgaagatgtttgagcagcttcagctcgcggtaggttcgcttggacagaacgggggtactgaacggcttcatgattttcttgactgcgactggctgtgcggtcaattggtctttggccgaactgtggtattagtggccttgttagtatatacttggtcttggaaatatcttgtgcgacatataatgcaacataccagaccagtccgaaggcacccattcccaccggctgtagttccgtatacctagaatcagttagcaccaacatcctctcaaggcgcttatgaagcaccccaagtagataccaaggaacagggcattgcgaaccggctggtgatctcaaaggtggtgccaaaaatctgggcacgcacgaattccgccatgatggaaggtgggggtatgcaagcggtaaacgagaaagagagatattcctatcagaattccacgtcaaacaagacgaaggagagtgaagatggtagctttccagagaaaattgccagaagaaaggggtcgcgaagaaagcaagtgtgttggcaacaggtgtggggaagggactgggtgaaaagcgcagaaaacaaggccgatgacgttggcgaagtccggttatgtggatgactcagcagcttctagcccgtgtattaaagtgggttctctgaatattatatgcaggttggcacggtggttgtatttctatgttaaaatctctgtggaggtgttgttccttgcaactatacaattctcatcctatctcatgtccaggtgttggttatgcgaacttccaaagttggcaggtaaccctcgctccaccacgcggcccagaccctggtcttatcccggaagatgtttcccttgaacaggattgctcgttgatatcgttgatatagactgtagaacttgtatagacagatcaatgcggtaaattttatctatgtatatctatatatttttttaattctgcgcttaactcgctcgagaaccatatacggagagctcttgggcctctattgagaaccttggcaggtcagagtacaacccctcaccttcaacccccttaagcagacatggtagatatcggaatttaccaaatctacatgtatataagctctaccatagcttcctctctggtgcttctataggtctggtagactgtcccggaagacattgctgtaaaagaggtccgttccccaagcctagagcacatccctccggctatcaaagcacaattgactgtcccaataggccagctccaatattctctgacgtgtcttcttagcttacaacaatgcaactcctggatgcaatttggcggctgggacatgtgaaacaatgtctgccacgctactgcggacaactagtacatgcaacaaaggcctttgaatgaggtgcttgactggacaggaatgcagcttattttaaactctggagatatatctccggggatgtattccctaagtgtacctgatagacatgtgcacattcgcatacaaacatatattcatgggagatatatatatagtgactctccgtggagcctgacgattacctctctacctcacactgcctaggtattaataataccaatgtcaatgtgctcttcctagccttgatcttgccagtgcgccctgtacatccgtctacaagcctgaatctacttccttgtcgtgaggggagagggtcagtgcccggcttcaccgcatatccaagagaagtcagtggtcccaggatgaaagcagcacgcaggtcatgcaaatcaacagaaccatagcatttataagtatacaattctacaatcctatataatggagactatccagctgtccggagtactccgcgtcccaacccaaccccgccttgcctgaggcagtgccccaattttgccggtactctccactttaaagctccagagtgggttaaaagagtatggaacggaatacttggtacggtacggagtacagaactcctaatcagagatttggattggagattcgaggtaaatagaatctatataagatgatcgaacttccgatcgaagatacatgataagaacatatgatcgcacagcctgggtcatctggtggcgccccgttcaattagagcccccggggctgttttctgtcgcttaaacagtcttgttgataggagttctagtattacgatctgtgattgggatggttattgcccggcctaaaatgaatgagatctgacagcagaacgtgcccgtttcccccgggtttttccttacaccgacctgggacatagctatatatggaccagacaaaagaagaaaatgaacagatctaacaagaagcccaaagatgcagttggatataggtaattgcatatcagatacaagatacaagacctataaccacaaagaaaaagaaattaaaaacaggattaattacattaattaccaaatgtaagctgagccgtacctgtttcttacatatcttacactccctctccactcccccagcatgacgatggtcgcactgactctacctctgattcttttaggactcaggacacttttctaccctgactctactctcacatttatcactctctaagctcagtctctaatttgaggtcatccctgcctctccgcgtttacacatattccgcctcccccgtcctaaccgctagacccgaactcaacaactctccttctaaacccgcttgtcgcaactccttcgacctcagcctttccccttgacaccttctcaacctaggtcctcttgaaattggctctgatctcacgtatccctatttccacacctggtcgcgctgatcctttcccgtgcgtggcgcttggcagtcttacaagcgaaggctccggccgtcttgaccggcacattttgttcctgcgcgtggtggatgagtcttctccctgctggtctgggttactgacgatttcgcaatggggtcgtgtttcagctcggagtccgcgggggacgcggaacagaagaagcgaagtcaacagatcgaccgcaagctagaagaagattctaggcggctacgaagagaatgcaagattcttcttctgggtaggcattcgggtgttcgcttggaggagagctgatggttgactttaaactcgcgcaggatctggagaaagcggcaaatcaacgatcgtaaaacagatgaagatcatccaccaaaatggttacaccgtcgaagaacttgcgctgtaccgattgaccgtgtacaaaaatctgctggattgcgcaaaagcccttatcggagcataccactatctcaaactcgaaccgtccagccagaaggtgcaggattacattacatttctggaagagtacaacgtggacccggatcccaacactccgctcgattcgaaaatcggcgacgcgattacatatctctggaatgacccgtgtacatccacggttttggaacatcagaatgagttttatctgatggactcggcaccatagtaagtccacctatcgttatttccgatcgcaaggccgagttctaacctgtggtcagtttcttcgacgaagcgaaacgaataacggcccccgattacgtcccggatgtttcagatgtgctccgggctcggacgaagaccaccggtatatatgagacacgcttcacaatgggccaattgagcatacagtacgtgggaacagtcttgaacacgatttggaatagctctaaccagccacagcatgtttgatgtgggcggccagcgcagtgagcgaaagaagtggatccattgcttcgaaaacgtgacgtcgattatcttttgcgttgcgcttagtgaatatgatcaagtactactggaagaaagcaatcaggtatgaggctccacaccgaacgtactataccggagctgacagacttgcagaaccgtatgatggaaagtttggttctcttcgactccgtggtcaactctcgatggttcatgcggacaagtatcatccttttcctgaacaaagttgatttgttccgcttgaagctgccgcgatcaccgttgagcaattacttccccgattactcgggcggcaatgacgtgcaccgtgccgccaagtatttgctctggcgattcaaccaggtgaaccgagcgcacttgaacctatacccacagtgagttcacttgatcctacattgccagtttccacgcaccgtgatttttgacagctttctcttctcttagcctcacccaagcgactgatacctcgaatattcgtttggtcttcgcggcagtcaaagagactatcctacagaatgccttgaaagactcgggcattctatagccgttgaatatacaccgaaaacccagtcacacaagtgccctcataccgagtcatacgtatgcgcactttccctctcaactaaacttacgaccaatcaccgtcccttttctcaacgtcgctctcggtgtccctactaccctcttcaggagactgcctgaacagtttttaccatacccctttcgtcttcttttgcttcttttgctttttttctttttttcttttgaccagctgcaggtgttgatggcgcctttatggctttctcagctgacttcccaggcgctagttctggcctggggatatcccattttggtacttaatctggtttcctctatcaaatatgggtttatgttccataaaggtctcagtagcatgtttggaccgtcaaccaagctactgtttctgttccatgtgccctttccttcttgataagtcccggactgagcgtatgacaaccaacccagaaatgccaccgggcaagaacccggtagcgggactgaatactttccggactttcttcgtgtgctcgatattcctcacgaacccatcaccaatgggatttttttttccttgtctcccttgtcttcactgttgtatcttttctttgccttgtctcgaggcctgtttccagcccctcatgcataccagggctgttttcctattttcgacattgccatgtcctgctgatattactctattcctctaattcctcttctccgttttcctttatctgcgatctcttactcttctcctattacagctccctattgacctgggattcgattccaagcgcttccacgtctgatgctttttgttcgcttttgcttttgttctttattgctagcttgttcagcgttcttgtttcaacctcccgagaactcttacctatcttgcatggaccgatatcgggattgctgagcatttgccctatgccagatcgcggtcccccccggagccctggtcaggtggaacggagctgggattgggacgtgacacgggcttattatgtatagtgagcttcgagaatcaattctcctattcgagtgtgttgtccatactgtccctagatgtgcttagcatagatatcttttgggagtgaggacaggagtgatataaaaagtagaggaaccctctttataaagaactaagctatggaggaaatatattcttggcaaacctacaacgtccaaaccccgccccgacccatctcaccgccccaccactagagatttccccgatagatatcacaaggccccgcggactagaaccctcggaagcatacggccctatcgccgtgtaatgaatccaatgaatctaatgcatctggctaccccaggttcacgatcgagtcctggtactccagtagggctacaagcacggtacatacccgcttcatgcaatgcgtctgtgcgctggcatttgcggggtaggtttgcagtctaatgcgcccaagctggcatctaatcaccaaatcgtggcaaaacggagaagtcggcatgggctggatggttggtacggaagagctcgatagtttcgggcgatagatagctgatgtggagccgatgaagcccggaggagctgggcttctaggccctccaggccctgcggatttatattggccgttggagcatttccgggtcttttatgcgagcgccgatggacgtggcctgatgttgtctcgggcataaaaagtcacatgtacataactgcgacttggataatccgtcatgacgtacttctctctgcggtagcacgccagaaacaggcttcacgggacactactggccaaaaataactatggcgaggactggaatcagttagaggagtatccgaatattatttgaatattaatttgcatattaattcagaggcaacacccgaaaaaaaaagaaaatgtcggccggtgtcactccaaaagtcatgactacatcccctccccctcttttctttttaaagtagcttcctcttcaatcctcttttctttttcctgtactggactttctccagcttacagctctcccaccttcacctctttctctttccatcatgtcgacgaccaccccagatgcagctgcagctgcaccggcccaagcccaatcgaccctacctcgtcgggagcggagatcttcttccgtaggagctcccattgccgacctccagggtcctgtcggtccgggattcagtcgtcccaagcacaagcgcacattcactggccttgggcctgccgagattaagcatgtggaagctagcattcctgagccattaagagaggcgtgagtaccttccgcgagcacttgcttatagttgaactaaccaattctcgcagatggaggaaattcgtatgtggagaaaatcagggtatcgggatgcggggttccaagctaatacttggagtcaatttagtcgcctgctgaattcaccactaaagaagagttcgaggtaagtcccactggctttcgtacttgataccccagatctaacgcctcgcagacagatctcgtgcgccatatcgaaaccaccctcgctcgctcgctgtataattgcgatgagttgtatgtgttctgtgcacctcattcaagccgttcttgctgactggctttccatagggctgcgtactccggaaccgcgcttgcgtttagagaccggttgatcatcgagtggaacaagactcagcagcgtcagactttcaccgatcagaagcgaatctattgtatgtctccagcccggtgacagaagacaatggctaatccctgtagatttgtcgcttgagttcctcatgggacgtacattggacaatgccatgctgaatgttggcttgaaggatgtggctcgaggtaagcgctcagacaattgtgacctggaacgtcgctgatggtagcagagggattgagcgatctcggattccgcgtcgaggacgtcatcgaccaggagcacgatgcggcattgggcaacggtggtctaggacgcctggccgcgtgctttatggacagtatggcgaccctgaactaccccgcctggggatacggcttgcgttaccgctatggtatcttcaagcaggagattgtcgatggctaccaggttgaggttccagactactggctggatcacaatccttgggagttcccccgacacgaaatcacagtcgacatccagttctatggtaacgttaaaaagtaccaggatgaaaacggcaaaatcgtccactcgtgggaggatggtgaggttgttgaagccgtcgcatatgatgtccccattcccgggtatggcacgaagaccaccaacaaccttcgtctctggtctagcaaagccagtagcggagagtttgacttccagaagttcaatgctggagagtatgaaagcgcagtggcggaccagcagagggcggaaacaatctcagcggttctctacccaaatgataacctcgagcaaggaaaggagctgcgtctgaagcagcagtacttctggtgtgctgcctcgctgtttgatatcattcggcggttcaagaagacaaaacgcgcgtggggcgaattttctgatcaggtcgccattcagcttaacgacacccacccttctcttgcaattgttgagttgcagcgcatcttgattgacaaggagggcttggagtgggatgaggcgtggggtatcgtgaccaagaccttcgggtatactaatcacactgtccttcctgaagcgttggagaaatggtctgtcccgttgatgcagaacctgcttccgcgtcacttgcaaattatttacgacattaatatgttcttcttgcaatctgtcgagaagcgattccccaaggatcgagatctcctgtcgcgcgtgtcgatcattgaagaatcgcaccccaagatggtgcgcatggcctacctggctatcattggctctcacaaggtcaacggtgtggccgagctgcactcaaaactgctcaagagcactctcttcaaagactttgtgacggtctgtggaccagaccgcttcactaatgtcaccaatggtatcaccccgagacgttggcttcaccaggccaaccccaggttgtctgcgttgattgcagagaagcttggaagctatgacttcctcacggacctcacaaagctagacaagctcgaggcctttatcaaagacaagcccttccgcaacgagtgggcggtcatcaagcgtgagaataagctgcgcctagctaaacatatcaaggccactacgggcttcgatgtcaaccccgatgccctctttgacgtgcaggtgaagcgtatccatgagtacaagcgccagcagctcaacatcttcggagtcatccaccgctacttgactatcaaggccatgtcagccgaagagaagaagaaggtggtgcctcgggtttccgtcttcggaggcaaggcagcccccggttattggatggcgaagactattatccatctcatcaacaaggtggccgatgtagtgaacaacgacccggaggttggcgatcttttgaaggttgtcttcatcgcggattacaacgtcagcaaggcggagattatctgccctgcttcggatatcagcgagcacatctccactgccggtaccgaaggcagcggcacgagcaacatgaagttcgtcctgaacggcggtctgatcattggaacctgcgatggagctaacgtaagtcttcttcacatatccaccttccattctgtactaacccaactcacagatcgaaatcacccgtgaaatcggcgaggagaacatcttcctcttcggcaatctcgccgaagacgtcgaggatttgcgtcaccgccacttctacggcgacttcaagctggaccctaatctggagcgtgtcttcgagacaatcagagacgacgtgttcggcaacagctctgacttctctgcgctcattagctccatcgatgagcacggcgactactacctcgtctcggatgacttcaactcctacatcaccacgcacgcgatgatcgacaaggccttcttgaataaggatgagtggctgaccaagtccattctctctgtcgcgcgcatgggattcttctctatggatcgcgtcactaatgagtacgctgatggtatctggaatatcgagcctctggttgttaaggactaaacacactttttgacaaaggcagtgctaagtctttcttcttttggtttgtcgtctcattgattaatgaactctacggctttggttgttatccttagcattaatagtatatcaatcattcttataagttagttatagaagtcatctagacatggtattcaagccattgaatagaacactttatatgcaattgctaaagaactaggtatatatacatctctatctcgacatacagaatatattacctcgaggcagtaatgactgatatcgaaaacacccactccatgccaaaccaagaaatctaaacataacatgaaaccataaaatacgtcaaaacccccaaatcgacaccctcactcctgaatcgtcggctcagtctgcctaggctccgagaaataatccggccaaagcgccatcttctcgtcccgggaaggcgtagccgtagccataagcgtaggaacctaaatcaccaccattagcaaaaaactctttcaatctttcaatcttctcttcaagggaccaaaaaacatacagcctccttactagaaatccgcctccacatgttcgcacgcgggttataccgcaccggcttccccacaccacccgtcttcctctgatcctccaaactaatcgcctcaacctctttcttaacatccgcaaagctatcaaacggcgtataagtaatcccatgctcgagacagtactcctcgagtctgagcccgcggcgcgcgaatagcacatcagcttcgcgggccgcggcgagatccgacacgccgtcgccgatgaagacgatcagcgggatctcgtccggctcgcattcggcttgggctttggtgcgggcttggtttacgctctcggctttgtcgtggcctgaggctgtattgtcgcgccagacgggtttccaagggataccgcctggggcttggaggtcgtttgcgacgatttggattgaggaggcctttatgtgggaagatgtgttagtgggtttttgaatggacgatttattgattttttgattgatggcggggattggtttttgacattacctctttctcgccgaggaagatgtctagcgtgcgctgcagaacgggctttaggcctgcgctgatcacgttgaaggggaagccctcgcggacgcagtactggtggaattctcggaagccagagtcgagttcgaggttcttttccattatgtcgaagccgtcgccgaaggggatgctgagggatccccacatgtcgtctgagatgtcgcggaaggttcgctcgccggttttgaattgttcttcgagtttgttgcggtaggctgcgccgcagccgaggttgtctactaggacgtggccggtgtcttggaggaagattgtgccgtcgaagtctaggggtgttagttttggggtgttctgggacttagggcttgtggttgggattggagggtagggaagagtttggggtatatgaatgggctttgcataccggagaagatgatgatctttctcttttggttgtcattatttgcctgtgatatagccattttgatatagactttagaagggtttgttctatagatagatggggtatgtggagggagtggtttggaaagatacgaagtgcaaatttaaaagaaatgaaacagacctgccaaagtcacgatcctaagtacaattcctgtagaacctggcatttagccatagcaaacaaggtagacaagaagtatgacgtaaggagatctaacgacatcagtgtgggccgctgagggggctcatctgcacatcgtgagaagtcgaggtgttaatatggggtataacagccgctgattggctggtcgtcaagggtccgcataatatcagtggaagccgaccgagtctttgatcggattggtcaatgtcattgtggatgcatgatacatcatacatttgtcaagtaaaatggtgcaaattaaaaaaaaaaaaactaagccgttaactcggcaacccgacgttccagttccggtacagcccgtaactgcaagtccaactcttccttctcactgcgagattgttaataaccgctcggcggaaaggaagggcggaaacttactcttcgagtttcaaccgccgctcccagtcaagactggtgaagatgtagccgccctgtccatcgaactgcaggatcttctggtgatacttccagagactgcgtcggtgcgagacagtcatgagagtaatgccaagtttcttggccgtctcgtacataatcttctcaatctccagcgtcaccgaggatgtacactcgtccaaaatggcaaacttgggtcggtgatagaacaaccgagccatagcgatgcgctgctgcagaccaccggatagtacgtcgcgccattcttcctctgcatcccagcctcccggacggtctacgacggacgcgatatcaaccactgataggatctcgtagagatcggcgtcagtgacacccttagcgcgcatctcgcgcactccatctgggtagatcacttgctgtcgcagggtcccacgagacagatatggtcgctggggaatgtagaaaatatcatggaaagggggttttttcaccgtacctccgtatactggccagagcccgcccaggatccggaaaagagacgatttgccgcacccgttgggtccgacgatcaggaggtggtcgccggggttaacggtgaaggaaagcttacgcaccaatacgtcgccgttcggggatacgatcggtacatcgatgaactcaattgcgtcgctttctaaaactttaccccgaccagacagcacctccgcattctctgccgtcgaagcggaagataccaacttcttctcgaaccttccagcaaggaggtcgtccatcacttccaataatgaggagacacgcgaagtgtagccagccagctctgagatttctttgtaggagaacatcaatcggccaaaagcatctgaggaggaaagcaacattcggcgattggtgacgaagcctgggagtcatcagaatttaaaaatccaataccaaagggcaacaacttactttcagtgtgatctgccatgctgtgggtagtctgaccggggatcttgaagaagacaggcacactacatagcaccaagcccatagctccccagaaatacttgatcacaaagtcctccatgaatccgtggtaaagtcgccggcgcagaatgcggttcacatgtttgatcagcgtgaaataacccttgtccagggtatccttctcggcctcgtggccgtggtaaagcgccacttcttcattgtactcaataagccgtgaatggaggaaacggaactccccctccagccgagcctcatcggcaacatatttgccaaatggtggagtcagcatacgcatgacgttggcggacaactgcactagcagactcatgatgaacagcccttcacctcccacgttcttggagagcgagtagttgtaaatagccatatcgagaatgggcttagctaaattggaatacagttctgctagactgtctgagaagcgggacacatcgaccgtgacaagttggtcgggattcttgattcgatcgtccaaggcggagatggcatagaaagtcatattagacagatacttctcgtggatatagtccgtgagacgcttgcggtagctgagagcaagcttgcactgatggtaggcgagctaatacggcgaaacatcaagtcagcaaatgtactgaacggtcgcatctagcaccggaaaccggagacttaccatagaattcgtaaaagtagcagggatagccacaatcatccaccaaacaagaccgagcaagaaatccttccccttaccgcgcaccaagttgctcacaagtcttccgtccagctcggcgacgtacaaactaagtatcgtccgcagcaccaggaagacggtgtggcttaccagcagccgtagctccttgctccgccatccgggtataacgatcttcaataaacggagcaagttcttgaagaattcccggttgatccccacgcgcttcttgcggggttgttcctcatcacctagactactggtgccgggccgtcggagcagctctacctgctgtgacgcggctttctgctcggagatggcattgtggattcgtttggcgagcgcggcaaagagggcgaggtatacggcacgtgagatattggttcggtttcgcaggtagagggatgttaggctggagaggatctgtttgatggagcgttcgggcggtagtagtttggactgagcggccatggcggagctattggatgcttatcagccagattcgggcgcatacatgtccgctgttgagtgagttgagggggtcgaagggttaggagttgaggagaaagaggctattgccatgacggaggtgacatgtgataccccaggaaactgggggagattcagccgaggaatccactttcaggtaatctcactggtctaaggtagtcaacaccatcttacttgtaatatatactcgaacgcatttaatgagaaaaatatacatagagatggggaattcattaattagaaagagtgatacagccctgaaacaaccacatgtatatacatatatgtagtcatgcagaaacggtaatgacaatgacactgaagatgccaatgataacaagattccgcccttctctcgtgcccgaaacgtatatacaaaagaacggggtgagtagataatactcaaagacatgcgctagtatgtacaggtttgataaaacgcaagcttgcagaagaatacataagggcgaagatcataaatcgagatgatataaatcaaaataagaaaacctaagacgaggatttgctctctggttcattgcggcctgtcctgggttctacctgatccctcggacggataccgctgttgatttgggcggcgatctgggcctgcttgaagcgctcgaatgcttcggtgtcttgctgctgagcagcgtagagttcgtcgacggtggtcccaagatggttaaaggccacgtcggcatcaaagtcatcgaattcagagagagactgctcatcgtggagaatatcaagcttttgccggagagcggcaatatgcgaactatcgtcctcgtattcgaaaggctcgtcgtcctctccaggaacaagagacgggttgaggaagtcgcggcggaggttctggccgatacggtgaatgtgtccttcttgggaggtcatggcccgagagtggagggaagttacggagctggtgcgagaatggcgaacggcatattggtccgtgtcttcctcgtcgaagcaattttcctcaagctggctgctgttcagattaccgctagcaaagaaggaactgcttccatcatcatcaccggagtgttgagagatggtgtcgggtacagtaacagtgggcgggagctgaggaacaatacgagtctctgggtattcgtcctcaaagcgttggatcatcttatgcaaggtcacgtccaaaaattgcaggcggccataattcgcgtcattacccgcacgatcttcgcgaataagagccgactggatccggactctgatattgcgcgcggattccagcagatttttcgacatgtcgcgaggccgcttagtaggaacagctcgggacctgcggcgtcggggcgacgtggtaccactgggcggtagagattgctcaccaagaagatccagaccttgctggtccagattcccgagacaaacacccaatgctttgacgacacccgtgccaccaataacataatcctcgtcgggagcggcgtcatcatcatcatcataaggctcttcggaaataaccgagtggccgacaatatgctgtagaatgtctggatatgggatatcctcaagcgacgaagtagagccaggaagctcgactgcaatggcgccgccttccagattccgcagcgagtaagccacaatctgtgatcctagagctttgacaacttcgttgttttctgcgctgggaacatcgatatcgactgcaataattgtccgtgaaacacggacagctgtcatcatagacgcatacacagcgcatgcttcttcctgagcaacggggtctgtagtggacgccaactccacaatctgctgattctcaagaatgttcagatgacacaagctggggcactccggcaatacctcggcaagaccaatgacatgatccggtgacaagttgacgtcagcgagatggaagcgcttcaaagacggcatcttcggcaggaagcgacggaaagcccccagcgcgctaggctgcgaggagaataactcgcgattgtgagagaaatcaatgaaccgaaggttgtggatttgcgcaagcgattggagcaatggggaaatcaccgacgggttgagcgagcaatccgccagactcagcgcataaagcggtgtttcaggttcgatcgcggctgtgagtagatcaagatcatcctttatagcgttgccacctagatccaatccttcgcactgtccagctttgaggtactcgatcacatgctccagaccctctcttgtcagaccattgttcgcaaagccaagtcttcgtagacccattttggtggttgcctggcagatctgctttacagcgtcgaccgaaggataacactcgctcaaaagcagttcttcaagatgatccccagcaaagcgctctgccagggcattcgcaaagaccattcgcacgtcggccgtaggctgggattggctggttgggccacgaacatcgaccgcaacttggcctcgagggaaaggaatacctgacaaatcaatagatttcagagatttcgataggtgcacaaaaaggctcatgtggcgccatccttcccgtccaattttcgggttgtctttcagagaaagcttttccacaacaccgtatcgttcctgctcagtggagtctgaagattccggtcttcgcaatcgtctccgtcgatagcgcatctgctctaccgtcttggtggcaagcagagctgaaaggatggctcgcacagaagtatctgtcaatgcacaattttcaagaatgagttcacgaactggaacgaccgcgagccaatcgctgaatgttgtcaaatcctgtgaggtcatcggaaaattgctcagatccaaagccgctaccgtgccaggtgactcggccagtgttgatgaaggcttggagatctcgtcaaccactctcttgagaacaggcgtctcacgtagctggcaacaacggcgatatatgcgcactggatcggttgtcgggtgactttgcgttttgggccgagtgacacctggcgctggaccttgagaatactcttcgtcatcgtcattctctgcatcgagttgtaacggaattataccgttcgcgactgcctgtcttcgctttctctccttccgttccttccgttctgcctcagacctcttcttcctctcttgcttccttgtgtggtcaatcacttccccgtttggagcagggtcattagatggcttgctgctggtggtatttgtcggggtagagctagactgggccttcgcatcgccggtggccagagcaggagtcgaggacgcgctattcttatcagccaatgtagcctggggatgcttcaaagcaccagcttcgtcttggtccttcaatttgagatcagccttcttagacttatggttagtagcttcagttagaggctgaggctgtcgtaattgattggttggaggagctccctcgtcatcgtcccgatgggagacacccgcaatttcaacatccacacagaacgctacgcggttgagcttggcctggttcaagtccgcaatcttgcatcgttgccgatttttatcgacattcatcacgcgacgttgagagaccacgacattgggattcaacttgggcaacccacccgagttggacgagaacttgcgtagtgcattgtgaataaaggagggtgatttgggcgatgtcgaagtaaaggactcttctttcctctcttcttccctgtccctcaaagagtaggcagcgccgaatgggttatgcgtatcaatggttggggttgttttcggactcgctggaggggccttcagactaggttgagacggtggggtagtcccagatgagaacttcgagcttagactggagatccacgagtttcgtcgtccgatgggcttagggtctgtctttcgcggcgctggtgatggcgtagatggcttttgctcctcgctcttctcaattggttggggtttcgcttgtactggcgctacattattctggggggctggcttcggttctgcggtggagggggctggcgttgggcgtggtggcgggttgctgttggaacgagatcttcggtgtgacttaggttggggggtcgttggctctgcctgtgtaccaggcttatcgcttgctgatactgactttgtgcgagacaagtgatctaaagactcaagagtatcagaagctatcccgacttcagatctccaacaaccctatcctggggttggggatgtgctggcataaaaagtggaactcacctttttgcgaatgatgaagccagctcacgtccacagtctgaactccttccattttgaaatcactcgagagtcaagagacggaacaaagtaacttcgcaatgtccaggtggttgtcgaaggtttatcagcggtgtggcgtcgtataaagaacgcaatgactggataggactagacagaacgacgcataattggctggtcccccacttttcgctgataatcgcaaaacagttcgaaaggagaatcaggtggacaacactaggggcccgatgacaacgaataaggtggaaatgctgggaaatgcgggagatggaatatgccgtataatctgcgaccaagagctcgccagatgcgttaaatcactattacagtaaatgacaacccaacatcatcgcctgtttcagcaagagatacatggtgaaatcatgcgaggggttactaaaagggatagagaaagtggcattggagaacttccgaatgcacaattaagcatagactaaggtgacataatcggggggagggggcacgtgagtgttctcattgggggagttaatataattggagtagaagggttggcgattggaccaatccggagaatgttcggctctccggtggcggaggacacaagaaccatggagaacaacatgtctacggagtacattattataaatcgtggagtttacggtggattagccgggagagccggggtgttagaaaggagtttggtttcgtaaaaaagggggaggatactggtgtcgaacaccataacgctcaatacgggtatccgcgatgatagaaacacctaaaaacgccaccatgtcctgggggaaaaacggccgggcagagacaacaaagaaaaagaaaaaaacctcccccacgcaaacccctcggaggggtagttatgcgatgaaaagaaacagtcatcacggcgtcaagcggacctcgggaactagggatattccgccgcacacaagcccctatctattccagacccggaatattcttgagatattcccagccatactcctcgtcgggtttctcggcttccatgccgagcgcaaagcggtaggcacgaacttcattctgcagaccagagatgacgcgagtagggacatcatcttcttcgcatttgagacggtaggcggtgcgaatcatttcggcacatttcatggtttgagcatgccagtagtcccggtcgagtcggctttccagatgggcgtcacgctcagcttggaggagattgttgtaatgcttcttctgagcaaggtagtgcatgttgttgttctggcagtaattgcggatttgctcgagcatgatacccacggcgtgctcaaactcccggaccatcttcatgttttcctcacgatggtatttatgatcggcactcacaagtttttccttggccagggcacgctcaagttcggcaatccgggcagctgctttaggcgttagtaaacgaagatgtgatcaatattcctaaggacatactaagattgtcaccctgctggccattcgggccagagctatcgacaataccgttcttctaaatgtgtgttagctatatatccaatctgagcaactcgaatgcatgttggcccacataccacaatctcctcggcattcgcgacgatgttcttggtcacatcccggttattcttcaagacgtcgctcagttccacaaccatctcatagagatgatgcaagtccatctgatggccagcgttcatcggaattgccgcacccatggcgcccattccgccgccattgatctggccgctgaccgaagtgtgggaaggggaaggagacggagtttggcgaggaggcatgttggatatgctcatcgcgctactactgttttcgacgtaacctgagaagttgccgttaccgttaccgttggtggccatactagacgtgttcgtgttcatagagacgtcggcgtcggcgaaagcgcgattcagttcctcgagttgagggtcgtcaggagtgaaggatttcggagtgctagtgccgttatcttcgtcgaaccaaggggcgtgattttccacgcctaggacctccgattgaaacttctcaaggtcacggcgagtaacgtgcgtggagcgacggcgatgcccacgcgtgaaagccttggaaggggagggggaagtgtcgccctcgatggtggcgggtgcactcaaaccagggacagtatcgtcactgtcactcgagtctgaatcgatagcaatctcatccacggagctctgatcagattcacgggtttctagtaggcagttgacaagcgtgttgtgctgggagctcacgctagcaggtggggctagcgacgggtcaacacgtgattggggtagctcacgtgatggtcccattccaacaagctccctcgtcttctcgagagcactcattcggatagaaaataagaactatgtggctgcaaagaaaatcaacaaaaaaaagtcatctaggaaagttggtttcccaacatatcggtggggcgaagcctatttctttccgaccggacaagtgtgtaagtgtaatggatcaatgacggtcgagagttggagagaaaacgggctctcgcccagtatgaaatgctcaaatttgctccggtccaatcacacgtgctctctgaagtctataattcaattcctgcagtcatacttggcacgtacttgccgttctcatgttttttgttgacatccatgaatgatgaggctggctatactagtgtcgccctgatggaaggtacatatggcaatattgaaacattgtagctagggcaacgtgctcgaaatccaagtagaaaattaaggaagctaccatcgaggcattggcaatgtgtaatcgtgtagtattgtatgcacatgtgggcatggggtattatagtttcgtcaaggcatatccaacagggcttgcaatctctgatcagaggctggaagtgagtaatcgtgagtttcaagggcaccgctgcttcttttctgttgtgcaatccggcctccaactctggctacgagcatgcgcattttctccaattcttgaacaagttctccatctttagtaataagattgggttgaatgtccttttggggatcttcaaatggctcgagtaatcgtcgaagatgttgcaactgatcaagccgccgttgccgttgctgcctttgactgtcgaggctcgcgagacgttcacggagctggaggtatctgtgcgacttggtgtaaggctggtggaacttcaatcagagaaaatccggatgtgtttgtaaactgaccttgcctgatcctcttcgcttgcttcctggctttccaatatgacaggcatctttgtgatgttcctaaatcattgtcagtgttgtcataccttgtatagagatggatggaaacgtacatcccccttgacaaatccgttgttttttcaatacctcgagcaaaagcatcccgacttcttgcctcttgactaaccgaagaccagtacaagtttgcaatctgttgggcgacatggtgtatcgcttgggaggaataaacaacgcgattgtgctgcttagcagctgcatttactatagtgctatgagtatcgtattcatcttgtgtatatgggcgcaaatccgtaaagaattgtgctgttcaattgtgatttgtgttctgacctttgtgtaggacatcttcaatgaccttgtcactcagatcaccttctgtggtttcagcagcatagtttcgccagtcttcgggtaaatcgaggctctcggagaaaatacggacttggctccagataaacgcagatttcaactcagatacagttcgagttgaatccatatcgaacaaaatccaatggtgttagagaagtaccattgttgattctccaaaagtcccgcgatcttctctgagcacgaccttatcgataagacatcacgtgtctctccataaatacgattttgcgggatggacaataacgatttgggtaatagaccacgataaaataagggaaaggatttaaagggtaacaattgaataatggtttgatctttcatacatgatcttagtagggtaataatgggaattcttggtgtggagtatatcctcggtctagagtgtatgtacctcggcaatctaaccgtccagatcgctttcaaagtatgtaatccaattcgtgcaattcccatcacaactcatttaatttacgagttagaaataaactgcagcatatcttgcagtgacccctatcatcactagcagcctccttcattatcatctcaagatggcagagatcaagcgaccggtgggcttactgttcgacgttggaggagtgtgtgtaagtcggccacttgacccataaattaaagatacatatctgacgaatctctaggttgcatccccgctacaagctattcttgactatgagattatccgaaacatcccatcaggatggatcaatttcagtatctcgcgaaccgcgcccaacggtagctggcacaagctcgagcgaggcgacatcggggtggacacggacttctttgcggggttcaatgcggacctggcaagcccggaactatgggcgcaattccaacagcaacttcaaaagaaacaaggcacaaatggttctaccattcctccaatgccgacggtggatgcagaatggctattctgggagatgatgcgggtatctcgcacgacagacccctatatttacccagctctgaagaaattgagagagtcaggacagttcctgatgggcgctctatccaacaccattatattccccgacggacatgaatacaatgaagcatccgaagtgaagaagcaattcgatttcttcatctcgtctgcgcacacgggcctccgcaaacctgaccccaaaatttaccaggtggcgttgcaggagatggacaatttagctaagagacgaggactagccggagctaatcccgacgatgttgtgttcttcgatgacattggcgagaacctgaagggggcgaagaacgctggcatgcgtacagtcaaagtcatacttggaaagacccaagatgcggtcaaggagctggagaagctcacaggccttcagttgctggaggaggacaaggcacgattgtgaggcgttatacatagaagtttgttatttcaagaagaatatcggaattatatgtagaaaggatgaaggattaagaattctatatcattttcttaattttcccaatttttccccattttcctgaattaattgtcgttgtttcttgtctttcccatggttaagaagttgatgttcactcgtcgccgacctcattttctggcgggggatgcagccacacgctaagcgaaatcccgcacaaagtcgacccacgaaaatttcccacttcctcttcttcgtccatctccagcgcccctcgacaccccgtcaaaatggtgagttcgatcgctgatggctgaaaaagccattatgcattccttttgcattttatttcctctccgattcccatcggagccgggtccctgcaagttgcttcggcgtaatttctgaagcgttaattgctgactcgcgatggtttacagcctttcaccaagaacgtgaagtccaacgcctacttcaggtgagttcaatccttttatcctgtgctaatcttttgggattttctgtttgctaacttgttttcaattatagtcgcttccagactaagtaccgtcgccgccgcgagggtaagaccgactactatgctcgcaagcgcctgatcacccaggccaagaacaagtacaacgcgcccaagtaccgcatggttgttcgcttcaccaaccgcgacatcatcacccagatcgtctactccgaggtcaccggtgacaaggttcttgcctctgcctacgcccacgagctccccaagtacggcatcgaccagggtcttaccaactgggctgctgcctacgccaccggtctgctccttgcccgtcgtgttctcaagaagctcaaccttgacgagcagttcaagggtgtcgaggaggctaccggtgagcactccctcaccgaggccatccagaccgatgatggcgagcgccgccccttcaaggccttcctcgatgttggtcttgtccgtacctccaccggtaaccgtgtcttcgctgccatgaagggtgcctccgacggtggtatcttcatcccccactccgaccgccgtttccccggttacgacatcgagtccgaggagctcgacgccgagaccctcaagaactacatccacggttcccacgtctccgagtacatggagaacttggctgatgaggatgaggagcgctacaagtcccagttcgtcaagtacatcgagaacgagattgacgctggtgacctcgaggagatctacgccgatgcccacaaggccatccgtgaggaccccttcaaggccgatgaggatgccggtcccaagaagaccaaggaggagtggaaggccgagtccaagaagtacaaggtcaaccgtctcacccacgccgagcgcaaggctcgcgtcgaggagaagatccgcaagcttgccgcataagcgtctcgcttcttatctttacgaccaaaagttcctaccaatatttcaattgagggaataggctactgccggcgttctattcatgtgatgtagtttttgacggatcatggcacataccactttttatttttactatcggaagggggttttttcctgggagcaattagttcggtgttattccaaggcaatttctttactcagttctaactgctccccaatgtccatctgtcttgttccctcatttgcctccttgcatttgcctgtagctgggacctttatagtgtagttgaacccactttccatcttgtaactattcttagtattgtgttatgcaggcgatattctgtttattctgatcattatgtttatgcacgtaattcttcgtaattacatcatgccattgtggttcgtcccaggttaaaattagatcgacgccatgcacacaagcgccaatgccgatatgataagtggctcccaaccccacgagtgcgttgccagcgcagcaacttagtggctgttcaatgagcaaggatcaccccaaaaaataaaaaagagcgctagatcgttccattgcctgccatcaatctccgctttaaggggccgttggatccccgaaaagatgaacctgcaattatttcacctcttgtatatatatcccccacctacataatctacacatcccaccatgaagagataccagcaacacacccacgcaagttggcaccgcgcctacacaggcaaattcgattgcccctggtgccaaaacactcaccggccagagagcacaacaccccagagcccgaaccacaacacccgcaaacccgcacaggcacaggactcagacaatggcaggtccagcagagcgaatgcgactccgacacctgtaggacaacggatagctcccgagagccccgagagccccgagagccccgagagccctgagagctccgacgttcctgttgaagagcaggctgctggcacaccgcccgaaccgcagaccccagagtcggctccagagtcggctccggacgtgaacgacgaagagacaccagagccggaatccgagtcaacttatacgccgtttaatatgggacggacctcgaggcacgggaataacgcgtcgcgtccgccgcttcccgaggagtggacgaaggaggttgaggatcaggaacatgggtaggagattctagctgatggctttggtcaccgctggttcgtcactgtgctgacgtgtttttttttcgatagtgctgcggaatggaatccaccgactgtggaaacttagcgctttgggctagatacgttctagggagtctcgaatgcccggcaaccacattgactctcctagaggagtctcgagaaagacttggttggaatacatcgagtcgaaacattcacattaaactacagatatcaggatcttgcttcgcacaagtttctattgtacataatttcaccaatctattttgactctaatcatacccccttggcctatcgtcatcagcagtcaactcgcttgatatttcgcaaatggcctccggcgttaagttcagtcctgcatcttgcaaggtagcggatcgtctgggcccgttcttccgtacattcctcgaggaggcgcgtggtttgagaactattccgcggtagttgattaatgagagatttagccaactcatagtcgcctgccgactcggtttctgtggaattcacccatgccatttaaggttcgtatgagtcgtcatcatcatcaatcatcagcctgggccaccagtgaacactctgcctcgtcaatgtcaccgagagcctgttatgcactgcactccaatgctttaatggcttctttgttatcttcactcgatcccttgcgtaggatagctttggccttatcgtaccctttgattagctctgctcgtgccttgtctaacaagttgagttctttgtcgatatctggacgccgagatcgaggttgaggccgaggtttccatcccagaccaggggcagaaccagaaccagcgtcatcatcggagttggattgaaatcctgttggcttagctcgagcggggtttgcgtaccaaaccttgtcacgagcaccgcgcatttctgcagccataatctggaataccttgcgaaaatcatcgggtttttcccagagaacacctatccttctctggttggcgcgaagcaacccacgatagtgaccaattctctgcgggttgccagacatttctgcatccgaaagctcgttgtcaagtctcacttgctcaaggcgtggatcggagtagtcttttatgatctggtcaatcaagtcacatggatcgagttcttcgtaagcccatgatatccgtattcgactgaattgcaatgccgacaaaaggaaactggggtcctcgcccttaatgctagacagtttagacttggccatagcccagtcttccttcaactcagcttccttggattgcttttcaagctctttgttagtgcggatttgagtttcgcgacagacgtccaaagccttgaggagaggttcgaggattttcttgtcagggatctgaagcagcagagacttggctttatcataatcatattgctcttttgcttcctggatcttcgctataaggtcttgcgcagactctgtcgtgaccaaaggttgagtatgtatgctgacagaagagctagccgggacgctagccgggccgttatgtcggggtcgcgaggcatgatgtgtaggcaaatcgtctgtcgacagggataacatgttagtatgtcctaataacactccacagcaatgatacaacataccatccgaacttatctcgacatcgaacccagtctgtgagaatgttcgcttcgcagcgccctgcgcaagaatgatttctaccgggattttaggtaatccattcacatagctttgcccagaaagtcttcctgcttggccttgaaccactggcgaccgcgaactcgattgagccatgttgcttcggttcggatgactgatggcatgtatatgggaacgtaattcatctatgagtggtgccagttgaggtccacgatcacacgaagcctgggaacgtaactttgtttgtaccagcgtcctgacacgtttccagtgccagcccgaaacctcccaaaattgatcagcaacacgatgccagaagtcgagattgccttgcgattttgtgtaacggcttttgtgcacaatgcagatttgaaacagaactagctgctgatcaaggctcagcgacggcaattcaggtcggtcccgctgatactctcggatcaccgtccaattaggggtcataatgcatgggtcgcgaggtattgcaggcagtgacgatgaggatgggctagtgcctggacaaccacggggctctacctgcgtagtttctgacggagggttctcagcaatgtggccttccccagcttgacttcgagatgcagttggtgatcgcatggtcggagctggcagacagtaccatgccctgtcgtaggtatcgcgcatatcttcagccatcatctcgaacaccttgcggaaatcatcgggctcgctccagagaacaccagttccaaacatcttttccccaacaaaaagactatgcaggtcggtggctctctctgggggcccattccgttctgcatgttcaaagtactgtgtgaatttcacctgttcaaggcgagcatcggggtatttcttctgaagctgaacaagtatttccatgtgctcgtctttgtgcgtcaaacgtgcctcactgtatgccaatgccgcaagaaggaatttgccgaaatcgcttttgatacgagataggagagacttcgccccctcccagtcacccttcatctctgcctctttggcttgtttttctaaatccttgtccgcctcgtaaaatgctgatcgctccgcttccaattttctgaggagtggtccggacaccgtcttcttcggaatcaggagcagcaacctcttggcttcattccagtcaccgcacaatgattcttctttgcttcgtttttggaattcaatgtcggcatcacttaacggttcctcgggctgtagcaagctcacgacttcaacatggccatcgcacctctctgtactgacgccggctgatgagttcaagaggattcgtccaaagttctcgccatccacttttagacgcagagatagagaagtggctttatcttggtcctcattgtgcagggcttccgcgaggtccactatgggctctaatgccatatggaccgatgccagttgtggatctgaaagtatagacttcgcgccgctaaagtcacccttagccaaagcctcgttgcacttgaataatgccactaatgctttgggcctcttgcctttcatcagagacaccagatcacaggccttagtcaagtcacgatcaacaaattgcgccaatacagtctcttcttgaaggcttctgttgtatttgttttgtattgcttgtctcctttccaacgcgacaaggagccggcccgatctcaccttgttctccattgaaagcagcgaggatttggctttctcccattcaccatcactctctgctttagcgctttccatttcgcgctgcttctctatttgctcatgtagacttttattagactcaaattccttgatgtatgattctggtttttggttgtctttgaattgaagcaggagccacttggcctgatcaaagtcacagcgcattgctgcggacttgacccgctccaatatggcttcttcgacgtcttgccaagtcatatccaaatcagattgaggaagaggcgttggagatcggtatctgtaatcggagcgtctcagctccgaccgccatttgatgaaactgatgtgttccatcatttcccataaaagtgattccatccggtaaccatcagggtcgacagggcgaacagtgtgatcccgatagcggtattctgagagctttttttgaacaaaggacctgacccattcttcatgccagccagaggcagcatggaaatcatcggtaacagagaaccaaaaggtaagattcgaggacagccgcgtgtataaatgtttgtaccgtatgcatattcgaaggagagctaccggcgaaggctgggagccctgtgaaactgatggagaagtgtcccaattcctttccttttccatgtgccggactgcgtactccagatcacgtctccacatcgttgaagggaatgatacagagtactcggtactgccgacggagataggattcagcctagtacgtcggagatgaattaacatacgtagaagtgacaagggatatttttatactgggtaactaacttggtatagctgtctggtctgacatgaggacaatgcgacaggggtggaagcaaaacccagttaagcgacggttggaatgtgcggaggaagatacgcgacatgcgacgcgacgcggtgacccgacctatagtcactctaggaaggagtctagggactggacggtctactccttatcggagattggtctagggtaaaaaaatgcgactgttcatgcggagaatacatttttgaaaaaccacagttgaagtccaactggaaatcgcggtctttaggaccctaatgcaggtacgtctatgatacccactggagagctgtatcctttcgccattaaccgcctactcttattttttagttctcgctattaacatttaggcttggagagaataggaaataaaaacttatagtataggaaaatcaggttaaattcggtggagaagacgggaccttggagatgggactagggactaagatattcccataggagtcctatatagatctctacagatgactaggaactctatccgcctctttccgaattattttcaaattgtcaaggaaacatcacatatttccaatccgaaagagctagagaattgcccatgcaaagcccgcttgtcagtagccttaaaacttgctactcagtgactgcagttgcaacaagccttgcttcttggaaggttcctcgacgagagcaacattacggacgttgtctgctaaaggaaacatatatctcccgacatccacgcttgtaggccacgacgctgcccggaatgcagcttccgctagctttatgagcattagatcgcttccctttgcaccgaggatagtgctcccgatcggtcggtgttcaagtcttcctgagattcgtgattgatagggcatttgtccaactagagacgatcagtaatttactccggaattgtggccaggaaatgagaagaaagaagaggataagcactgaaagtactgacaaggtagcacaagctgagggattccaaggacaggagagatgaatttttcaccaatagttccagcactcgatgggctcctaggtctagtcagttctcaagaaatggaaaacccggggaatggggaacgactcattagcgatatcccggtacttcgggttagcagatccatatggcataatcataatggcatcagacagggtgtttggatcttgtgagaagatgttttcgtcaaaccatctctggaatactttcagttcttcacggtatgcattgtactcatccagagtaacttctttgccaactcccctaacacatttccggttagcttttctccactcggtaaatttcatatcttaccatctgtaacgcaaaactgggccttcaaaagggagtttctcatatttagattcatacttcgatcggaagtcgtcaaatccgtgatagtaatcatagcacatagaccagaacgcactctgtgtaagctaatgtaagtttcacatcgcttcgaactggtgaatgactggattaccaaccttggacaggtactgcttcagtggcttcccgttcgcctccaatggagggcacttttcccatctctcagcgatactaatctcgacccgcttagtgcccaaaaagttctcgaggatttcaacaaattcatccaccatagcttggtgctgggggttgctgtgggggaaaaagtcgagtggatagatgatcttcgacggaaatgccgtagagttgtcgttgagatccaaagtatgagaggcaatataatggagatctgacaagcttcggccgaataatcccacaacatcgaagtgactggttatgaatgaatcagagaagtcatgtggaagaattgactagaaactcacggtgaattcaaaactataccatccatagacgttgattcagtagatggtctgatggaaaatagcccattgcaagttgcaggtgccctaatactcccagcagctggagtttcaaatatcaatgtctttggttcgaacttggactccgggtttgaaaaagaaagacttacagtcaccaccaacagaagaatctagccacgagtatcctgctaatgctgcagctgaaccagaggagctccccgacgggctctggtattcgtcgccacgggggtttatggggcaatggaaatcaacccactgatccgtaggctcatcagaggatgcaaattgagtcatctttgtctttccaacaatgatcgctccttggtcaataagcttctgaacgtatgaggcagtcttctcttgaggagggtacagttctgtatatgcacgactcatcatggtcgtttttgttccgttgaggtggaatatatctttcaagcagacccgaatacctgcaagcgggcgttctggcgagacacgtgaatagaggcgactaggcactgcgacttctttccaaatcccgtcatcactgatagaactgaaaggattgaacctaatattgcttgttagagaataaaccgttcgctttcgccgcactcttctgttgtgaccttgagaacaaacctttcgggctggagaacattttccggcaagactccaaaaatgaacgcgtcgagacaatccgggtataggcgccaggcttggtgaatattggagccatgaagaaaataagggcccgctggcaggtcgagcgcgctggacgtgtacactgtcgaaaatttctgagatactaaggtggatttaccctgattcagttcttcaggagtgccggttaggactattgaacgtgagaattctctgttgtagacatcgtctacctgttcaaagagattcagttgctgcataagtctttcagtgttttcttgcactatctttgcctcaagaagaacaacagctttggtctcttggacgtgaatattttcaagaatagtgccctataagaacagctcaatataatcctccttaggatatagacgaaagcttaccagtgcctgtgggtgtacgagatatttagtactcgcaattatttgcgttataatctgatcaaaccccatctcagctatggggtgcggaggcgcgcaaagtggggataattggggataattgacttgaaggatagagaaaaaaaggaaggttgaaatattcaatgaatttgacacagtgctaaaggtcttttcgggactaaataggcgtaacgcggaagctcttagatggagggggtcgagtctgcccaacgaggctgatctcggtgtaagaaaaggcctagaaaatgtggcatgctgcacaataatctcaattcgtcccatcttatgtgcatgtgatagtactggctagcagacttgtttattaccggccgatatgggaataatggcgggacatcctatcctgtgacatctcgggtttagggctgcaggtggtgctcgaagaagttagccagcctcttctgattggactactatagccacgcagcaaatgttcacagcccccctcgtaatatacaaggatgtgctttcaaatataccctgtcactgcccaatctcatgcgtagcgcccgaaggcgatgcgaacaaaccggaggctcaaacagtcctttcagcgtctggactttgttatgcggtctctttctccctctcccgctctatctctagccataaaatcaaagccctccaagggagcaaagactaggctaaagttgctctgtgttaatcactgaatttggggtatcccaaggtcgtcagtcccaccggaactatgattgctcccctttcggttgtctacgacggtgtcagaaagcctgagattgagtaagttctcctctgttagaaaagaagttttgtcgaataaactaaataaaataataatagccttgtctcaattccgggccttccaactatccatcctacgtacaagttgaaagaccacacgaaatggcttcgggaagtactgagccatcaggtgccccaagcgcgaatcatggcatttcagtatgattttgcaaaggattcaatggaagtctcctgggcggaactatttcgaaatgttgaatacctactatacagtttggtacatcggcgcgagggcacagaagaccggcctgtcttattcatctgctacagctttggggcaatcatcctcaagaaggcaagtcacaagtagattatttattccacctccataattcgtagctaacattatgtatttcttgatcaaggctttgttgatcgcaaagaaaaccccgatattccgaaacattctcgacaagaccaggggtatcatattccttggctgtctgaacgatgaatcaaatccacaaatcgaggagctatgtcttaaatgcgctgcggtggagctaggagtgatcatgaagaacaagatgatcgacaccctgcgaaaaacggacgattggacaataattcgagacgtgatagagagcttccgcgttttgagatgccggttcccggtacgcaacctctacgaactcaggccgactaacattatgagccgtacactcggagtcaagaaagtaaagcgagaaatggtagctttcacccgagattaagtgtccaggttgatgaagctgatgagctaacattggtcaaagctatgcgatttacgggtatcgtccttaggttggtctgatgaggattgcgtgggcattgaaaaggatcatggggaactcacaatgtatccactcagaagcgatgaagatggatatttcgagacatttatgcgcacactcacgagaatgatcgatgagattgtcccaaggccaacgcaacaagcatgggaaagaaatgatcccgacgacgaccaaaactggcttgtgatggaaggaacttctagcaaccggtctgcgaatctggagggtatgttaaccctcaaaccatgttattttcaatatcttatctgacatatttatctccctgctacctttagctgatatcacaaagtcgatgttgtcgtataacgactcagcttcatttcacacatcacatggtactcatataccatgttatgtcatgaccccgtttgaagataatcccaatttcgttggaagagaaaaaactctcactgccatacacgatgccttggccccaggtagtcctagcgtcggacaaagggtattcgcacttacaggcttaggcggaatggggaaaacccagacagcagtacgttatgccttttcacagatggaagtgacctacaagattgtgctatgggcacacgcagacgggcagtccaaactttcagagagcttctctcttttcgcttccgagctgggtctgggagatggattgacccacgcaaaagccaagcaagcggtcaaagactacctcgcgattgtcggtaggagctatcaattgaaaccactattgattctgatctgacccttaatctagatgtggactggctcatgatttttgacaatgctgatggtgatgataagacggaactgctagcagaattttggcccccaggtgacaaagggtctatactaatcactagccgcgacaaaactttgacaaatcggtaccatgggagattcttaaaggagcttcattcaaaaaacgccgtggatcttctgctgaaactcactggaatgcccaccactaccacagaagagagacttgcagcccgcgaaattgtcaagagagtaggcttcctaccactaggaataaaccaggctgcaaatttgatcataaatctctcatgcactttctccgaattccttggagcatacgacttgcaagagctcattgaagactcgtctgatgtccagctcatatcggggggttcttacaagtactcgcttcgaacggtttggaacatgaacttcgagaagcttagtagtgcggaccaagctctgctgaagatgatctcgtttcttgaccccgatcgcattcaaatgaagttgctcctggaaggaggagcagagagcgcgaatccaaacctgcacttcattaatacttcttacaaagtgaccaaatgccgggcagggcttttgcgcagctctctgatctcgcaaaatgaacgaaaagatgagcttcagatgcatcgtctcgtacaagcatactgccaactcaaagtgtcaccagaagaagcacaacaaagttttggcaatgcaatctcgctcgtgaaacaagtctggccagtcccgcctcgatcagaggtgcataatccatctttatgggagagacaaagagctcttctgccacatgttcaaaagttatgtgagttttacgtggcatcttgccgaagagaccagcctcttatcccaaaagacgtcgtgaattgggactttccttccgtggtatacgaggcaagctggtgagaaaagaaactcttaggcttgaaagtagcaactaattaattcaacattcaggttctgctacgagagtgggatgctagagtctgtttcagacttgctgaatcccgcgaaggattactgtatccaacatttggcttctggaaggggttatcgcctgttggcagatatatatgggtgcttcggatctctatgcacagagtcaaaccaatttcaaggcgcctacgataacttcgccactgaatggaaatatctcgagaaagctttcgaagcaggggagcttgaaagaccaagtatttgggaagtctttggtttagggaggcttggaaacgggcaccatgggctgcatcaatatgcagaagcagaagcatactatcgaaaggcattggccgcctgggaaaatcttccaggtgataagaagctctggcacagtcatcttgcaacgtgtttgtggttacaaggtcgcccagatgaaggagaggtagtcgtgcgaggagtcatcaaagacgaaaatgacacaaccaatttcaggtaggacctagagttcacccctggagaccatcggtattcagtgctaatgcatgaagcctttagaactgcaatggcaatgtatgcactaggcaatattcaaattgcccaagctacaggtttgacactcgaaggaaagaaaaaggacgccgaagataagctagctgaggcaatgaatacccatgtcaaagtactcaatttgtggacgaagacattgggaccaagacaccacaagacctcggatgcaatgtacaaggtcggctggcatttgcacagacgccaggaatatgcccaggcattgtcagtctctatcgttatttctcgcctcgatggcctttctgcgtgcagtactgactaattgaattagggacatgttcgagagagcgttggatatctatgaaagtcagccgcatctatacaaaaacgaaattgcccgaacgaaatacaagataggctgcctgaagcaggatacacagcatcatagtgacggtgcagctttgatccgcgaagcggaccgaatcagacagcagatagtgccgccagaagactgggagcctgcgaagtgcgaggaggactttgacaatatagtccagttctggacacgataaatttgagagaaatggagttcggcagtcacaaaaggtcgcagcagagaataataggtcaaattgtaagagcaggtggcaagtgggaaatctgaattatctatcattcatgcccaatctctatcgtcgaaacttccatatatcggcagtaacatgataattcttgatctttctaatccattctggtccgtaaagaacagaaagagtcaaaagataaatccctattccacagccaaaaggccattgccatgacggaggaggggaccattcccgtatattcatgccgaagacaccagtaatgaagctcaacggaataaaaaatgatgccattctggttagcatattaacctcatttgcactttgcacccctctttccgagagcacaagctgtgcaaatccaaccagaacgcttgtggccgactcgcaatgaccagtcaaaagtttgcagcgttccatcattcgatcatagtctgcttgtagttttctttgaatgagttcttttcgttttatcgtggagtcggaagctggctttggccaagatgagcaacctccttcagtaataatgtgctggttttccgagagaagttccttgacccggcttatggtagcaacatgttgcctaagctgacccaactggaactgtagcttatcttgatcgacgtccagctgatcttggcattccgtaataccttgggcaagaacattcaaggtctgtgaccaggaaagaaatgacgtggtcagaaccgtggcaaggaggaagaatggatcttcttgcattaactgatagtccacctgatccctaagaactatgcctttgaggggatgaaactggtctagctgtccggatgattcaccatcatctctgctagggatcggtgcgctactctctgctggcagattgtaaggcaccaatgggacaataccaccatgtctagaccatggcagcccttgttccgtgaccattcggctactgtcagtcagaaatatgcctaaatttttgattagctcttagagaccttcatgaatactcaagctccaggccccactcaccatgccaattattccggtgcgtcgcaatagtgaaggacaccatctcctccacactgcatatgtcactatcatgcacaacaatctttcggacatgtgtggccccatacattctgtgattgaccaatgccttctcatagttgagccgcaggccctccatctcagctcgtttctgacgcatatgcagcgatgtttgaccggaaagacgggacgggtaaggagacatgggtttgacgaggcgggaaaagtgcacgcgcaccacattatcctgtcttgacggcagagttggtaactctggaacgctgtcactcagcttgaggctgacaggtaggtgctcgataaagaattctgggcggacggcaaactcggctcccagaaatgcgatgcagtcaggatgtgggaacccttgcaataccccaatacgtggcttgcagttttcatcatgcagcccagtagtgatgaacgggaaagcttttggatatacgtcgtcattggagagcgggctaatctcaaataatttgacctcctgaagtctggactttcgttgcccggaacatgcatcaagaaagtccgccagctgttcgtagaaggaagctgcttctgggtgataccgataacaagatcggatatggcgtagataaacagaacggtcgtcggtgctgcttgacatgcttgagtatatgtcgaagtaggaataagccataaacaggaacttggtttttgttatgttctagtggtaaaatgcgctgcatggtttccgtcagtatatacaaaggcttcgagggctttgtctttgtccactaggtaaaaatatccaagatacctagcgttgaagttcagtagtggtgccaatctactcttgtttctcgtatatatttaattggcttccgggcagtgcaatcaatatattaaagtcagccactatcccactgccaccttcacccgggcatagttacgcccaccacatgtatgagttcaccaataatacatggctcccgtacaccttcccctctttcccctctttcccaatgaaattgttgatcgtctgagcgataacatcgcttcactttcgtgatggtaggtcttctccacctgctgtcgagagtagataaatagtggtgcaagcacagggctgatttacttttggcctatttgggaatcactaccatcttctcttccaatcactctactcgagattccttgaatcttgcttcactgcgcagaattcgccatccaagggtacttgatcgcaacaatgcatccacatgtggtacgcttactctagacatatggtgatatctagtaattctgacaacagctatttcagactcagcttgtctcaagcggcacggagtataccgacactcacgtcaaatcctgggctcaggatatcctgaataaggcatcgcaagatactcgccaacagccgtggaagcgtgcttttgccgcaaaagaagtcaatgttttgtccccgcaggtggccgatatcattaaatttgaccacaggagcgcctgtgctaacgctgaggctggaaactgagatatgatttagatagctatcatcaaaggggttggatgaagcattactatttagtcacttgaagtccgttgaatgtgagattggaatatgtagcaaacgtgagttgcctagttaatatgccagttcaatctatatgctgatttccattcttttgtgttttggtccaataaatccccggataaggctcaagtgaccacgtgtaaagttataaattaaccgtctccccccagggccgatgaatgccaaagccaaccttggaactattccaacgcttaataagcagatctgtcgtccaatcatctataagagtcatggagagaggcatatttcgctatctcaagtggcaggagctatacaaggttgaaaaacctttccaggtcctcattgatttgcctgaggatgctgaactgaagcggcaaacaaatatggaatttgaagatggttcggaggtgaccattacggatattcgagccgttcaaagtcgcccccagattgacacacacggatttacatatgcttatcacgatagtagtctcactgaagaccagtttcttgataaggtaaatgttgagtcaatatatcttccagagtgtgaggcactgcttcggagctcattggatggggtcgatgagatccatttcttcaattggctggtattaagcatacaaaagtttctccttgtggatatctcattgttaacacatgcaggtacgagataccagttctgttctatcgggcaaggaggtagatttgaacaatcctttggccctggttggacctgcaagagtcgttcatattggtaaggagtgtgacactttggctggtctatgtagcttctttcaagctaactttctgaagatcaaacatccactagcgcagtagaaagggtctatctcgagctgccatcaaaggcagagaaacttctaaaaggaagacttcgtctgattaagttggttcttccttcttttacgtgagtcaatatggtcacaggacatatgttgatcataattctagcttatggcgccctgttaatggcccagtggagaatttcccactcgccatgtgtgacggtcgaacagtgtcacctactgcacgagtgcagtcagatcgaatcagacggaaatataccggaggcacaacttttgtgttacaagagtctgagcaaagatggtactacctcagtcatcagaaaaataatgaggttactatattcaagaactttgattcggattatgatatgacacaaggtaagcaattgcgcataaaaagactattataagcaactgacatttcataactagacgcccctcattcatccttcgtgccgctagttcatacccctgggattcggcctcgccgaagcatcgaggtcagagcgatggtgtttacatatgctccgaattagttatgagatatatggcagcctcaaccatccgcagtttggatgagatttaccatgcagacagacaagtttttattttctcaagtgtaggatcaggatatgtactgggctgaagggcaagaacaatatgggccatttcgatcacctaaggagcttttgtttgttttgttttgtttctaggcgttttctgttactataggcctatttagtccaatttttatcataagataagcttcctaaaatcatggtcattctcctaagaaacgtactatacttaggcgatactagggctagccagatctaatagaaaaatgatgatcatcggttgttgtttaatgtccatctctcgagatatgggcgtagcccgtatctctacggcctcctatgggatatggggacgtactaagctatggttttatgtacaataatgagcgcccataggaaggaactccttctagtgtatgatctggcgtacggccaattggctgcccgtccttctgatgattatcggtggttgtctcgggcctcttttaacctgagtacaacctaaaattgcccccaaggcagtgggaaggacaggtgcagtgacatatatatatatccagtgtctttggtacttgttggaatggcagtgttgacaggtgagaagctaatagcagttactgtaataggcaatactccagacattggatagttgggatacgaggtgatggacaccacgggtttgacacaatgagtcttactaagctgtaaattgatacagctcggaacaatcccaggattgcccaacaaaatatagtcatttggcaatgccaagacatgttcgggcttggcaaactgttttctgccaagacctgtttatgtacataaaatagcctaaaaggggaatttctacattacttttgcataatcatgccttcaatttcaaaacgaccatggacatctctagcattggcgtctagactttctgacaaagcacagatacacatcttttatttggcgagatcgttggatctgaggcaaagagacagaattgcaaagaacgttgtacacaggttgcgaaatcccatgagttctttcttcccattgtaaagtgcttctatgtacattgtctaatatatatccccactcttggtatgggctttttacatctgtcctgctggttcccatcttgtgataagctacagatatctggcttgggacaggaaatgtatttacaacatggtccccgtccgatgaatattgtatcaaatgctgtggtgagtcaattgccaatcgcacttagtccagccaagaaaagagcacgtcgtaaaatgctttggggtcttggaggaagggtgcatgacctagaccggggaacatatggagcgtgcagttagggatcatggctgcggcagcagggccaagtacatcataatgtcccagcttcgcagcgacggcagggggtgaccatgctttaccaagtgccgaaacgtcactggcgcccaccaagaggtaggtacgcgtctgcaggagaggcagctggtagatgatcggctggctgagtaaagcgtcggtgacgagggccatcacgtacgaatagtcggagccatagtcgccggcgtagatatcggctagcatgttgacccaggcatcatattcaggcttccaggggccattggggaagtagttggcctgctcataggccttgagagtggtaaagttcgacacaataccgctcttgtacgacgcgtcaattgataggtagggcacacccttggctacccaatcctccaagcccagtggattgacgaggaaaagctgttggatgctggccgggtacatgaggccgtagcgggcggcaatcatgccacccatcgaatggccgattacggtgacttgatcgatgcctagcgcagtgagaagactgtggatattcaaagcctgctgttgcacgttgtaagaatagccttgaggcttgctcgatttgcaaaagccgatatcgtcgggaaggatcactcggtagccggcggctgacaggtgacgcgctgtgtcggaccatgtgacgccgcagaagttgccgccatgcagcaagacggctgtcttctgagtcttgttttgtttccttgccgggatgtccatgaacgccatcgtgaggttctggcgctgattggagaagttgaacagcttcaccggccaagggtaggggtaactggatccgtataagtcggctggcacatggccatcgtagatggtgccaatagggtcggggtcggactgtgcgcagacgacagtcgtacacgacagaattgccgagaaggcactgaagatggggaatatcttcatgatgtggttgcttgaaaaaggacgaagttcgaagagcacggctccctgtcaatcgtataagaggaaaatagacttattctttcacctcctgatgcgatatataccagcttgagaattattttgatgtgaaatgaaggcggatcccagtgtagctagcaccagagctaggggcaccgcgatgctacctatatgtagttagtgatctaggggctgatcacagcctttcctgtttcgcttctcagccggataggggcttctcaaatgcaatttcattagtaccaacttggtgtttttaatcaactgaaatttcactagcacgtacttggtgtagttaggtactgttgaggaggggcccggggtgcctgggtggggcgctgtgctgagtaatggccacctccagccctggagggatttcgatttctgtcttcccttaagcattcaacacgcagattcttcttgatttcgttcaaatgagttacttttagtatttcccatcatataaatgtacatctacttggttgtcgtcaatcgaccatccaatcctgggcaaattggcccccaaaatttctcaaactagcgccgttaacgccatgcagcgtgaaattaatcacgtatacatctttgcgacccccgcctagcgctccattttttcttctacaagggtctcggatgaaacgggtcaatgccccgatcaggccgcgcgatgtaacctgatcccaaagaatcgaaaacttccgcgaataggacccttgtcactctgctgcataacacgctaacacgctatcccgccggtaacgcggtaatgtacttatgtcggggtgcaaaaaaaaaaaaagatgtaggctgaaggcgacatcactactgatacggccttgaattactacatatgtatcgaccgtcgcctcaatcgcttttgcaagaccatactacccacccccaggcgacctctagcaatttgctatgtccaaaaataccccaggaccaagcagggcgttggagatccaagtgccatgtatcgtgttcctcgtgaccacgccggctttcgtggctatacgactgtggtcccgagtcaagtctaagtcggggctcggctgggacgactgtactattttggcgtcttgcgtgagtttttaattcaagagattgagcttccacatgcagatttaacgctcctatcaacagatctttgcgattatcgtcatggcttttatgctggcgtcctgtgcctatggctttggccaacacatcgcgaatctcacaacaccgcataagctaatgactctgaaggtacattgggaatccttctcactgcagttttctcgttctatattgtggctgaggatcgctgacttcagtcctgccagctcttcttcgttagtcaagctttctacaagctcaccatgaatatgacgaagatgtccatcctgatgctatatctacgcatttttatccagcgttggttccggatcacctgtcatgtgctcttggctatcatcacctcctatatggtggccaccttcttcgcctccgtatttcaatgcacgccagtggcccgggcctggaacaagactatcccaggatcatgcatcaacataaccactaactggtatgccaacgccggcttctcaatcgctaccgatatcatcatattgactctaccgatgtacccgctctacacatcgaaaatccggttgaagcggaaaatcgccttgatgggagtgtttgccctcggcaccttgtgagtttcaaataccgcagtgcaggcgttatctccagactgacccggagttttcaagtgtcgcgattacaagcattctccgaatgcagacgcaggacttctcgtccaccagtcctgacattacctgtaagtgtcctcatagtcaccccgaactgctcttactcaagcacttacgagatctacagacgacatagcctcctcggtatggacgataaccgaagaaaatgtggcgattacctgtgcctgcctgccaatgatgtggatgccacttgctaggctctttccctcggttttttccatagatcatggggccgacagccatggaagctcggctgccaagaactcggaacctaacaccacttcgcgtccccgaagcaactggacccagcttcatgcgtaccctgataccaagggcatcagtatggaccaaaccagcgattccccaaaccgctcatcggaagatagcgcgggcgagggcggcgaatcccaggatcaaatcgaaaacggcatcacgaaggtcacggaatactatgtttcttattctaatgcgaaatcgcttcgaggaaaatatatctctaggcccgaataggtcgaataacttgtggggtcctaggcacacgatgactgagatgtgttctgaattatcgctaaatccgtgcaatgaataaatgaaaagtataattaataaccttatcaacaaacagtcaattgttgtagtttgatcgtctctttgctttccttagaaggctattacaacatagtctctagattttgtagtagaagcttagtgaacttcagaagttcaactacaatgtacctaggtaatgagagagttatgccccgggtggcatacttgacgcccgtacagggacactgagattcccacggttgtcctcaacaagacaatatgggctttccgctaccgacggagttgacatgcaccattttggagtacatttctcacgacgacccccatttagctaaatatgcaacaattagtcgcgactggccggcgatcgtcgagagcagaacattctcatacctcaatatcgagacctccgagcagttagcggaattcaatgagctatcatggggtcaaagagggagctatgttcgaactctccatttgattgttcaactagagtcttactatgatgatgatggcgacgcgtgtttgcgctacgaaaatgaaggggagatgcaacgaaacaacaagctttttgacacatcgactcagtcatttttcattactctggccaaatggccaaaagaaggcgccggctttagtctttcgattgaggcccagtcccccgatgatattctagatcaaacgcccgaggacaagaggtaccgttttggtgatttccgggatcagagattcgaaagatcataccttcaattcaattcggagatcgttgctatcaaatggccggccatccctacagatatctcccttgtaatcataggcgggcatgatagaaggcaaattgaaccagcttcttgttcttttgtcgtgtcgaagttacctcgactataccgcctgaaacctaatttgaatgatcattatagataggacctggaactgagaaaacgctgtagaaacggtatactatatgacaatgcccggtaggatataatataataattggaaatctagatttcgcggattctattctactatggtatgccagtatacggcagctctgccttaacttctggtttagggcccctttcaattaagactctttcccaccggatttaacggtaaaaggaaagccagatatactaagcttgcgattgcgggagttctcgcaataattgaaagtaatgagcgtgacctaatttgtgcttggaaaaaaattcttctagcctatagataaatagaatcacaatctctagcttcccttttggccctatcttaccgatctatcggtgggatacgaaccggtgactccaagtggaaactggatattcgcagaggaaggagcttaagaatccgaatataaggatgattatcacttgagtgacccaggctccgataatgagaaggatgagaccgatgtaaattggacagccccggaggaccgcaatagcagaatatttcggtgtaagtacattcacgagacgttcgatgtgtattatctctcagctgccaatgccgctctttgtatacccaagatgaataatatggttttggaagtgacgaacgcctggaatatacacaagttcgtgtacactgtgaggaatggggtagcgaatgcgacctggttccatccctctgcttctacgagtgtatacaggccaagcgatagagtcttacaagtctggaagcaggttgcttccgcgcgtactagaggttttcttgaagttgaaattagccacatcagggggaagtttcattcaattctgcaaagcgtttacacggacgtcactttaggaacaaagtgggatcacgctgcaattgacaaccgacaaagagttcagctgtagtttacgaccgaaaagtaataggagcgaatggggtggtcggcgagtctgattgagcgggataccaaaactcatttcgtacttttgaatcattcaagggatcaggaaaaagctagaatacacgtagcttcagcaagagagatttaaaacaaacatgagcggcaacagttgtaggcatctctctcaatgttttaccggacttcgattctcaacggtgaagggaggattgtaaggaaagggagagattataaagcagtcactatgtgaatgaaaggggtagggatgtaccagagaggatatcaagggtccagaatcatcatcatagatgaaggggactggaaatggggacaaatttaaaatatttcacgggaaagacccacggaaaatagtactcagatcaaggtcgccatgattgcatttggatacaaacatgcatggctacaacgtattgacttttaaggacctcttctccaacctcgtgccactggctcaaggattgatgaaaagaaaatattccacgaatggaggtgccaaaggatacgcctgtcaatgacacgagtgccattgaacaaactgttccgccgcgctgtgcaatgcagggaccagcctgtggtgaaccgtcttgttgatcacagtcacccaaacaaggtaagtatgaagaagaaagaagaaagagaggaagaggcgggggggaggcatccttatataccttttccctggggcggtggcagattcatacagggcggtggattcatacatggcggtggcagggggcctaatcataagtaagacggcgctaaaccctgaaggcaaaactaatcagaacaggcagttcatctgcgggttacaaaataaatatacgaaaaaaagcaaggtaagaccatgaacagacatcttctccaagcgcccggacaagccgaacagttgatgaagaggattcgcgtcaatcgggggtagtgtaagcccgatgacactgtgcaacgaggcatgcgcaagcacagaggccaagtcgcgaggtccaaacattagaataatcatgatgttctgcaatgcagaactttcagcgattaaactgaaaagaacagatactacacttgatctaagccagaggcaaagagagctgaagaagaaagaagagaagacgaagttctgggggcagggccactttcttatagttatcctaagggcggtcggcttctgccactattcacaaatgagacaaacaacgaataggcccgcttaactatatatgtaaatggtaacgtgatgataaggaacggcgtctcttatttccggctgacttgtttggaactgtcattcattttttggagggagaccataatgtttgtttgtttctacaacatgggacctcgatcgtattttggacattacagacaccgccttattaatttagtaccgcttttgccaccgctttagtttcaaactccggtgaaccattaacaaacttaagtcactttgccatatcaaatgcttcattgtctacttcattataaaggggttgagctttataggaatcaggtggaatataccttcttttgatcgaaatgtaagttcttatactatgcaaagtagaagtgggcagaatatatgggagaaaaaataaagagtggcagaaatgtggcataattttaagtggcaccagatcaggaaggcggtacttagccttcaggcaggggccgtatcagttcctcgctcccttgcttcaactttaccagcttcagcaatgcagctgtatcttattcgccatgcggaaacagtacataatgttgcaaaagtcctgtaggaattgatatttctcaattggcattcccagttgacttgcactgacttcttgtgatagggcgggcaccactgattcggcactgaccaaccatggagtggctcagatcaattgccttgctcagcatttcgtctccaattcaactaaattcacgacggtgttctcttctgatttgagccgagcacgaatcacagccgagggggtctgtcatgcacaggttccatcctccggtgaaacacctttgcaaccgatagttactcaaaatttaagagagaaagattacggatcgatggaaggccgcttctggaacacttctcctccatcgccaaggcctcgagactgggctatccctgagtcaaaagagtcgatgagaaagagggctgaaagctttttcaacgaacacctgctcccactactgatgcgtgatccaaacggccgacagaacatcgcagtggttgcccatggcattatcctccaagagctatgggcatattgtattgagatcttcaatccaacagatacacagattgctcctcgaattcatgacaccaacatgactacgcctcatcggaaacctacctggtcaaacaccggctacatgactgtactgattaccccagacgcgacacaaaagactatactgcatactttcatgccgggcttcgcatttgttgttctgagtattgacgagaagaaacatctttccaatctccgtcgcactaggggtggcgttggaaccgccgcgcatgacgtgaaacaaaggaagattgaccaattttttcgataatcgactttcaacagagaaactgtggcgatgtacaagttctaccatcttcacaatgacccaaatatttagtccgtgtgaaacacctcatccaagggcttccaccaccctggaccctccgcactactcacggctccgggaatgggactctcctaatcgtgggttattagcttctgcatctctccatttgtattgaatcctcaatatacctgcatcccatcggtcatagcccaccactctctcatcttcggcaatgaccgcatgttctccatatcagcttcgatatctgttccgacgtacttgaaagtcgcaaatagagtccgatcgttgtcgaagtagattgagtctgtagaaaatataccatgttagccagtttgaacatccaatatgatcgtacatatttttggcattgaacctacagtctacaatgttgcattccttgatcttttgaaggatctcaggccaaacattggcatggcactccttgtatgctgcaacagctaggggcttgaggtggacgatttgggcgaagcgacggggttgaggttgaggcatgattgttcgatatagattaaatatttgaaattaaggcgaattgcaagagacgaccaactgccttttatgccccgctctagcttcaacccgcactcggagtgcgttaacccgagagcttggcatatatccacatgcatggaggcggcttgaattaatatggtcacgagacatcattagaatgtagatatatggatactactccgtactagtgatagcccatctacatggatgtacttgtaatactagtggtaggttgtactttccccttgtatctaaccccccctggacaccccccccnnnnnnnnnnnnnnnnnnnnnnnnnnnnnnnnnnnnnnnnnnnnnnnnnnnnnnnnnnnnnnnnnnnnnnnnnnnnnnnnnnnnnnnnnnnnnnnnnnnnnnnnnnnnnnnnnnnnnnnnnnnnnnnnnnnnnnnnnnnnnnnnnnnnnnnnnnnnnnnnnnnnnnnnnnnnnnnnnnnnnnnnnnnnnnnnnnnnnnnnnnnnnnnnnnnnnnnnnnnnnnnnnnnnnnnnnnnnnnnnnnnnnnnnnnnnnnnnnnnnnnnnnnnnnnnnnnnnnnnnnnnnnnnnnnnnnnnncccccacctccctaatctgatcactgtgtcctattcaaactgatctcgctggtctcttttctgactctttctaatttcctgattaccttggtctcagcctgcgacttaccacgatctatccgaagaaaacactgaaacaatgacatcaacaattcccgaacttcctattttcaatctcggcccgtccacactactggatattgcaacggacttggtcaaccgggttcaacaagctgcgaatgacctggtcaaccatgttttgccgcaaaacgtgacatttgagaatactcttcacccactgacaaatattgacaacgagatcaaagggaaagctcaatacctcgcccttttccaggcagtttccccttcgtcagaaatgcggacgacatcctcaacagctgtgaatatggtggataaagcatattggggtgtcttccagataccgtctctttttgctttggtcaacgttgtttataagcacgaggaggatagccacgccgaggaaaatgcaaagagtgaatatcgaaaacttcaatgagcagtgatgccggcctccaataccgaaaaatgatactggcacctggtggaagtcaaaatgagatgatggcactcaaggcattcttggggaggtcgcccacgcttgacgcatatcttcgagatcttggtgctcgttgatagagcaagccgtgtgattatgagtgaatagaacaagtctcactgactctaccaaagcctcaaataatactgattgggcacacgtcgtactctgcttcggtctggttgtcggtgtggctcttcggcaaggcaggattgaggcaccaacggccataactggccagccaaggagtgtaccttgtatacataggattctggacaagacatattgtagtaagccccatgcgcaggtgcctgaatcagtagacgaagtgcattattgattattgatgtaatcaggctttgactgtcttcgtgcagattgacaggcatcccctttgtggctttcaggtctttgtcgctgtgtttccatgaagctatatagaaaaaatctcggaccggctcgcttccgccaaatacagtttagccagtatccacattgggaatgcggaaggcagatcagtctccactctgtgtctcttggcgttatcagcatctcaccaattgttcgcgggtcggatatttgggtcgtctgcatttttatacttccccatttgccacactacgacccatggccgacaagacaaatcccaaggggacagccccttcgagcgaccctcctcccggccacgagaacacctccactaagtctcaaccaggctcagtgccccctgtgattaggcaccagccagggcgctaggcgggcatgactcaatttacctctccagcaaggccaacgcctagccaaactgccagtccaacttctagtagagctactagagcttcgccccttacaactgaagatgatctcaacctactatgcattgccgttgactataaagatcggtttactaccatgaagggtaatgccgttctttatgaggcgaatgcagaagtatggagagcccatgccgggcagaatatcagtcaccaaacggttcataagcacatcactgacaggctaaaagagcattccgccatacttgctataccggaacctgaccgcgctaaactgaacgctaccgaagctgctatgtttgactacggcaatgagatttacgaaatgctacaagagaatgcagtggcagagcagcgacgaagagatcgcagggctcgtgcggatactaaggctcaggcaagtaccgactctgtgcgggatgacacagccgatgaattagtgcaaccagcaagggaaaaaaggcccagaaatccggtggactctgagaggaagaaatgcagcaattaacctgtctacgtatagcataccttactaattataatatagaaagtgagcggccaacagcccggccacgaaccctacctccctcgccattgccttcctcgccaccactgcaaacagaaatcgctctatttcttagtatgatgaacagtcgagcagccctagaagcttcaaccggggctaaaaaggaagatatcactcggctagaaactcgaatggatagcatggctgttactatggagggatgatgagtttgcttagaaccattacgcacaggctgccaaagtaattaaacttcattttcatacaaattaatttacagaacgaatctcaactgtacatacacttaaagtatcgaaagtattagtatattgtctctttcatgatagggtctgactcttaggaataggacgaatccaagaaacggccaaattggttgccagagatatcacaccgatgatccatagggatcgcccgtagtttgacccattgtatctgaagataatagcaaagatgatacccccaagattaccgagaccaccaacaattccagaaacaatacctagtgacaagatgttagctcgatatttaagaagtaataacggaatcacgtaccattagcaaaaggatacacatgagggacaagagcaaagttagccccattagatgcctcaatgaagaaagccaggccggcgacaagaccgaacatggtcgcttccgtggacgggttcgacaacccgatcgcaagctggaaagctcccatgccgatccccaaaaaggcgatcaaaatctttttagaccaggccgtgcctgtatataggtaaaccaagtctccaaatagaccacccgcaggccgacagacgacgttgagcaggccgaacatggcagcccactgtcccgatttcgtttggctcatgtgtgggaattgttctgtgtagtaagatcccaccatcgagttgattgctagctctgagccgaacgagcaggcatagggaattgccagggccatagtggatagactcatggctacgttcagggcttctcgccgagtcggggagacgactgtctcttgtcggaagatgtcgatctggcccgttgctggtgtatcgtctatgacatgtggtgattgggtacctttcttttcgatgtcgattgtggcggcattgtggggtgtcatcgttccgctcgaagaagtgcaggagttgatgtcgacgatgttggcgttgggggccgaggtagtgccatttgaatctttcgcccagaggtttctctcagaccactttcctgtcggtgtatcttcgcagaggactaacatgcatagggcgacagcggtgatgatgatgaatggaatgacgtaggcgatacgccatgctttgtgagaagggatgccgcgggattggacgagggagtcgtaaatggcgggcattacaaagcttcattgctttcgttagtggattaataggagaaggggaaaaggtagacacctactatgtgattcctccgcctgcattgccccagcctccagagagagaattggcagcaccaacaatgcttttgtcgaagaaaccagtgcaccagacctggcatgggacgaaagtgcctcccagaattccaatgaaaaatcgtagcgctattaggcccttggggccagtgacgagaccggccatagcagtagggatggctccgcatagaagtagtcctacgaagaccaatcgtgggccataacgatcacaaagtggccctgcaacaaatcggacgagtagactgtagcggtcagagaggtgttttcgattgattccatattgtggtacctacgttgccaggagtgccacaatatttgagttggcaacatcttcttgtgtcattttcaaatcctttttgatagtcacattcaactgggaagccggagattagagactgcgttcttttggtatataaaacctgatgggactttttatcgtgaactcaccagtggtggaaaggcataccatgataggaatgccaccatgaagccaagccatgagaagaagaacacccgtccatatttatcgaaaggattcaatactggaatagatttcgctttgtgggtacttgggttgatttccggtgatacatagaggcgtttaaaaaaccctggtgccattttggttggctctttgtgtagtcgagcgatgagatgaaagtaggctcggattacttgatataaccttgtggattaaatggaagtaagagctctttcggagatttaggagaaaattcaagaatagatagaccttcgtatctatatagacgtttagtgtgctttgctagctgaagtatatatcgcaactgcatcttgccatgacacatgcaagcacaatcagtctgatattctgcctgtcaggttgtccaatcaccgcaaatagccacgtgctgtcaatcaaaaagagttagtcaaggcaccgagtactccgtatatctcaggtcgctgatttgatacagcgtaaggacaaggttgcagcaagatcatcagaccctggaatcaatgcggaacttaatttttgccccagacttcatccctgaaacttccgcagtatcctgccatgatatgctggtagagataaggtacgaagtagaatgacctatagcagtgtaggatgtatactgtaccagattccatgattggagggaaagcctgatagtgtgattcagtccagttcatataactccgcggaccttcaattgacttaaagcttacatcataacgttctaccgaacctaggaacgggtcttttgctccacgttgcccagaaatccatatcgttgataaacgcgggcctcctcattggatgccaagccaaccgcgataggaactgaagagttcagcccgggtctttgtattggacgaccttggcgatttgagctccgcggaaatacttaattctgactgtgactccagttaatggattcagggttctgggttctggggtgaaccctaccgaagatctggtacaatccaccggtctaaaattagggcttcttttagcaaacgctttctaacaatcggcctgagtatctcttttccctgtaacttttactatgagcaaaattcaatatctcctatttacttgatacaccgagataagaggatttagcgttgactgtagaaataataggccgtggcagtttgtacattcgctagataattagtcaatagtactcagtataccagatataggagatcttcatgtgttgtcaaaagtcatccagcctcatcactgggtaactcttcataggtggtgtataaatacctgtaaccactgttggttgatcagagccaggctttaaaccatctgatgaagagttaaaggaattaataagaacctggagatgagagtcgtctaatcaattccatgtctcagatatgtatcgaggtcaccgtctttatatattggaatgacctagcatctgaagatgcctcttatgtggtctaaggcggcgatatatactggcttctttggcaatatttacgtagcatgtgatcttccatcggtccaggaaaagaagtagtgaaaacaatttatgctaagcgcatacattctcaagtgtactcataaggccatttttcatctcgatgttcccatatgcaacatattccatcgcataatctgcaactaccaatcaatggacttggctggttgcaccgctgatacaccagtcaaaaagccatcggtgaccttcttccccttcatacccttgaacttcttatcaaccttgtggaaaggatcctccgtctcactcttacgcactttccacttctccgtgcccaaaatcgaatccaactcctcaatcggcggaagtttgacatatacccagccatcgtccctctcctcaacagggaacgtagcaatattcatactctcatcatttgagcaacgacccgcctgttcaccgttgagctcgaagttgcgcttgtgatacggacacgacacccaatatttcccagcatcatcatcgccaacgaggccatcagaaagaacaaaagctcgtttgtgcgggcacatctgctgcgtcgcatagaacttgcccttgatcttgaagatagcaagctgcgtgtcaccgcgcttgacattcgccgatgacacctgaggtggctcgtcggagaaatgatctgctcggacaactggctgccaggagacacttgaccacttgtggcctttgaaatcctctcgctcggcagagtccttgggccagtatgtgggtcgctgctgggatcgttcttggataacttctaccgtctcgaccgtttcgtctgtgtttgcaaattgttggaagacttttcggcgcttggggtctttgacggtctcggtccactcgcagaagtaagtatcgactagttcgcgcatttgcttttccatgtcggcgcagatcccaagtttatcatccacgatcacttctttgaggtagtggattccgcccggaagattttcgatccatcgtgctgttcgctggagcttgtcggcggtgcggatatagaagatcaggtagcggtcgattatgggcatcaccatctccgctggcacatctgtaacaaggagttcggcgtgtctaggttttgcacctccgttgcctccaacaaatatgttgaacccattttcggtggcgatgagcccgaagctggcaactattagtcctgagtgttttcaccagcgtaggatttgcactcactctttgttttgggcctcggcacactctcgtacgcagccagatacagctcccttgaatttatgaggcgcacgaatgctcttgtatcgctcttccagtcgaattgccatgccgacactgtcgccaacaccgaagcgacaccatgtggttccaacgcaactctgaacgttcactgtcagttggtactctcttgaagataattgctccacgtactttgattgctcgaagagcctttgcatatgcgtgtccgctctccatacccgcatccacaagttccgtccagatatttagaagatcctgcttcttcgcaccgaacatgtcgatgcgctgggcaccggtgattttgcaatacagaccgtatttcttggctacagatccgatagcaatgagtttatcggccgtgatttcaccacctggaattcggggcaccacagagaatgtgccgtttctttggatgttggccagaaacttgtcgtttgtatcttgcaagtcattgatacccttgtccatgacgtgcggattgaacaaactagacagaatggaaccaattgcgggcttgcaaagttcgcaaccaagagattctgggttctttccgacggctttcatgatatcgacaaaggttttcagttgcttgatggccacgatgttgtatagatcggctcgggagtagggaatatgtgaacacactgaaaatgttaatgatgacaggagctagcactggagaaagttgatattacttacggtggtttgatacctcttgtcccatttcaagcattgtcttgttgaagattgactgaacaagaggcatgcaacctccacagcctgttcctgctttcgtgcatgacttgacttgtgcaatggttgtgcatgtgccattcttcacattatcggccacatctcccttggtgacattgtggcatgaacagatctgagtgctgtcatcactgcagagatgagttagaatttctccccaatagcagaactaacgatactcacaggtcatctgcattttcctccccgccattttgggcaccaaggatgaattgacttggaggaacctcgagttctttctgaagcttaaccatctgattcaacttcagatagtctttggtatctccaatcatcatgccaccaagcaagaatttgccgtccatagtaaacaagtacttcttgtacactccactaaaggggtccttatatgtcaaagccttcacaggaggctcctctagtgaagtatcccctcccagaccagggccagtggaaggtcgacgaccgggaagaaatttcggcccatctctgtcagcaaagaagtcaccgaaactagcgacatcaactccgagaagcttcaactttgtgctgaggtccggccgcgtgaaacccctaggctgtttatctgggttggtcagattgaaggcgagcacatcggccatctcaatgccgggagcaatgattccgaatgtctggttctcccagcttgcgcattctccgacagcgtagatatctgggattgaagtttgcagactatgcaagttagttggagactgaccaaaagactgttaatggacgaaccattcatcgatcacaaatcctccacgctcaccacactggatcccaatgttacgacccagctcatctcgaggttgaactccaatctaagtctgaatcagcacatccatcatcagacgaaagcaaacaaggacacataccgcaaagcaaatacagcaacaatcaatgctctcaccatcctcgaaagtaatccctgtcacattatttccctcgtcggtatgaacaatcttgacccgtttctgatggagaacatcaagtcccaactcctggatcttgcgagtgaccaaggaccctgcatctccgtctagctgtcgcgccaggacccatttattccgatcaatcaatttgacatttccgaaatcctccaggtctgtcatcgccttcgcagcttccaggcctagtagtccgcccccgactgtaacagccgtttggcctttatgctgagcagcaaagtcgatgaggcgttccaagtctgagatagttcgatatacgaagacgcctttggcatcgtaaccaggtgtgtgtgttggaagagttgcatcggagcctgttgcgaggacgaggatgtcataggctatagtgtcaccggtggaggtttggacagttttctccttgggattgattgctgttactcgtgtgttgatgtggtgatcgaaggatcgttctttgaacgagtcatactaataaggtgtttttttattaggtcttatgttcttcgctctcgaataggtgaaggcttacccattccgttggattgaggtataagtcctcaatcttgcgatgctcgaaaaacgacgagagtccgacgcggttgtatgctacatgggactcttcgccgatgacaacgatgtcgtattttcgctccgtatcctgtttaataatcttctcgctagtttttgttagaaaatttctcatgtccgtcgttgaattttccttacatgagtgagatagccaccattcccagcccaactactacgattttctggcgctggacatgagttgcaggactagggctgccatcgactggctccccatatcgtagtccatccagcacaggcatggttgagactggacaaggtgagatgagtacggtacaagcactgacgactacggaacacggcaatcattctaattttaagaaaagtaaattgtcccactgggtgtgtcactacaatgagattcgtacgaatgaacaaatcaaggctaatctggtcatggaatcggaagaatcaggaaagttctctcaggagattagttggttcgatctccgcggagatgatgtttttatgttggctgtgattggctgttagggtttcgggtttatctgaacgtctaaagataagaatgaacaataagatacatacttgactagacttgacgaaactctgatctcacggcatgtggagggctgtggatcagaagggggttcagggtccgcggagatctgaaaagtgctatactggcgatgatattggggcggagccgaggatcttaggcctagatgctgctattccacagcaaaatgtgaatatttggacgtttaggactatttggattcattctactcggtttttacaatatttttgatcttattttagagcaatttcgagggtctcttataccaacaatttgataacagcctcgcgccagcaccatcatggccagcataaccacacagacgataacagagtcccaaacgatctctctcaaaaacgaccaaataacaatcgagaacatcataccaagtccaggggagccagacatcccacttccaccaccgtcgaagaaccttgtcgacatcttggatgtggataaaggcacaccggatagccatgtacctcgcgatccacgattgattcggttaacgggagttcatccattcaatgtggagccaccattgacggctttatacaaagaaggtatctattcccatatgtcatagcgaagctcacaagctaagcggataccgaaggctttctcacacccccggaactgttctatgttcggaaccacgggccagtgccccaggtccgcgatgaggatatcccagattgggagattagtgtagaagggtgagtgcgatcgaaattatgctcgcaggcttcgaacgggaactgattgatgagctaggttggttgagaagccattagtcctaagcttctgcgaagtgcttcagaagtacgaccagattaccgccccgatcacactcgtatgtgcaggcaacagacgcaaagaacagaacacagtccggaagtcgaagggcttctcatggggtgcggctggtttatcgacagcgctattcacagggcctatgatggcggatattctacgcagtgcgaagccacttcgaggagcgaagtatgtctgtatggagggcgctgataagctggtgagacttcctatatcaagatttgagggtttcaggaaccatcctcgagttaagactgacacattccatagccgaatggattttacggaacttcggtcaaattgaactgggccatggacccaaaccgaggaattatgctggctcataaaatgaatggcgaagaccttcggccggatcatggccgccccttgagggcagtggtgcctggccaaatcggaggtcggagcgtgaaatggctgaagaagttgattctgactgataccccaagcgataactggtatcatatcaatgataaccgagtactcccgtaagtcttacgctaaacgatcgcgcagtgagtcatgctaacagttgtcaggacaatggtgacgccggaaatgtcctcccaggatcgcaagtggtggaccgatgagcgatatgctatttatgaactcaacgtcaattcggtggctgtgtatccacaacacgaggaagaaatcgatatatccacagctgggcccacgtatacagtcaaaggatatgcatacgccgggggtggccggaggataataaaagtggagatttctctagacaggggcaaatgtaattgcaccccggaccaaaggatggaacgtggctaacatctctggtcctttagcatggcgcctcaccgagatcgagtatgcagaagacaaataccgtgattttgacggcgacctgttcggtggcaaggtagacatgtggtggagggaagcatctttctgctggtctttctggtcgttggaagtcccagtggcagacctagagactagcgatgcaatcctagtccgtgcagtggatgaggcattaagcgctatgccgcgtgacatgtactggtctgtcttgggcatgatgaataacccctggttcagagtggcaatcacgaaacaaggaagtacgctgaaatttgaacatcccacacatccagccaaagctggcggatggatggaaagagtcaagaagactggtggtgacctgcttaatggtaactggggcgaaagggttgaaggcgaggagctcgtcgaaccggagcctgtgcaagaaataaatatgaagaaagacggcgtgaacagacaaatcgacctgcaagagttgaaagctaatagcagcagcgaaaagccatggtttgttgtaaatggcgaagtgtatgatggcacaggcttcctcgaaggccaccccggaggagcgatcagtattacatcttctgctggtttggatgtatcagaagacttccttgcaatccgtgagtcgagattaaaataccttcagactattgcaccgctaatttgctcttagacagtgaaactgctaaggcaatgatgccggattaccatattggcacattagacaaagcatctcttgaagcgatgaagagcgattcggctgcggattccgatgagccacgcgcagtgttccttcagtctcgagcatggacaaaagccactctcacagagaagagagatgtatcctgggatacacgggtattcgtgttcgacctggaacatgagaagcagacgctcggcctaccaatcggccagcatctgatgattaaagtccaggatccatccaataacgaagcagtcataagatcctatacgccaatgtcagacacaaacctgataggcaagatggagttacttgtgaaggtctacttcccaacggaaagcattccaggaggaaaaatgaccatggctctcgacaagcttcccctgagctctgagatcgactgcaagggtccaacgggccggtttgaatacctcggcaacggccgggtttcgatcagtggtaaagaacgccagctccgctcgtttaagatgatctgtggaggaacgggaatcacaccagtctttcaggttctgcgggctgttatgcaagacacgcaagatcccacgacatgtgttgtgctagacggcaacaggcaggaagaagatatattgtgtcgttcggaccttgatgcttacgtggagactgactgtcggaaatgcactgtcgtgcatacattgactcaagggtcggataggtggactggtcgtcggggccgtatttctgaggaactgctcgcagagtatgcggctccagaagagcagagtatggttctggtctgtgggccagggcctatggagaagtctgctcgcggaattcttcttgcccaaggttgggccgagtcggatcttcacttcttctaggtttgatgtgtctattttgcatatcagggcatgtaacattggttgtgtttgagttgtacaataaaaatggatatgaggcaacaacggaagccggaagggtatagagacactgggctttcatttgcatagacacgaaatgaattttgaaggaaagtcgtcaatcatgagttgtaacatgtccaagcagtacagataaatcgggtgataaaagtaccaactaagctccagtaggttgctctttacacattccgaatgtggacgaattgcttccttcaatcaataatagttcttgacgtctaatctcactcgtagatgctcaaaaacgctggttgggtctgtccgcgaagagaagaattcccctgatttagccattgatttcgaagtggcttttccggactccatgctgcgaaggtaattgacaaaggcggaggtctgttttctgaaagactgatacaggtggagaacagccccttcgctttcgttgcgcatcccaattccatctgcccttgagagaaggccgaaactgagaatagtgccgaaaattgactcgagcagtttggcagcctgcgcatggcgcttactgaggaataatgcgaacaacatctggtcaaggatatcttcgtgatagtcgcgaagtcgtggtaccgagtgagccgcttcaatcgtaccgtcgatgtcaccgcggttgaggcagtgctcgattttggtaagtgtgtcttgaaagcgctgccagatggacccaattccaatatggaagcagtaatcacttaccgctagcacaaagtgctgggcatccattctgaacttctggtacacattgtgtgtgtctcctgatagagatcctcgggcagtagaatcccggataagtcgtttaacggcagaaaccatgcggattaaccggagcaaatgcttgaacagacaatcatacttattcaaagagcgagcagtaatgagagattcaagaacttctggtggtgtgtactgcagacgaaggaagtccaaagcctctattgcattcggatttttacatccttcaatttcttcgtctgtcaattctcgaattccgaagctcaggccaccaggcaattccttgtccttctgggcgtgcgttttttcgtcatcttctgtatttgtgccaccaaagtaacaatctccgagcagaccaattaagacgagtcgcaactctgaactagctggcggccatgtgtcacgactgccgaggcgtagaccggtgtcgacaccactgcgcacttttccagcccttcgctctccactttccatttccgggtcgaacagtgaattagaaagacgagcgacaaacgagccctctcccagcaactggaaacgccattgcatgttcagatgatggcgaattcgatgctctttgaagagaaggtgcaggcaagagtagtcgatgagaagtgcctgtgacgaaagaatgggagcaagggataaatggaggccatatgtcaactcaggaccaagatagcttctttcattggtatcttcggcttcaaatccccgggctttatcgagcagtcgcttgaggccatctttcgaaagagccttgtaatccgtcactggtcctgaatcatttttttcatcgtcgatatcgaagagttgaaaggctgtcgttgtaacctctgtgttggcagtttgatcgacggtctgggtgaccacatttgatgatgaatcctgcaagcctgcatccccctgatgatatttcttgatctcagcgcggagtcttgactcgtattcctgggcttttgtttgaatttgctcaatgccagcccaggtggtcgcacaatgcagatggagaccaccgattcgtgagagaacatcgcgccgtgcgataggatgacgaggatgggatcgtttcaatagttgaagacttcgcccacactcaaagatagaacgggcttggtcggccgggatgaaagacggcatgtgctccgcttggtagatatagtcaattcgcgctggcccagtcttgaacttgccacggtcataagtttccagtcggacgaagcttttgccgtttgtcatatattctttgagagctgcgtcttcggatctaagcccaatccaagtctcgatgaatccgaaccatggctgagtcactcgaatcacaatctcatgcacaaggttctcgatccagccaaacttctgggcaaaaaaagctgcacgttccacgacaattgatatgacttgtgcgtccgagacagccctttgtgcagcgccaacaatagctgccaggacgcctaccacgtccccgcagcggtgaaatagtgcctttatttgtaggagtgaagcaatattttttgaatgatcggagatctgttgttccaggttaaagattattatctcaaccgtgctagttaatgtgaaaaacgtagaaagttctctgtagttggctggcgggtcttgggcaaataaccgcaggcgctgcatgttggtaccgcattgtaccacattttcgatcacattttccaaggccatcaggctaataccagagactcggatattatccttcaaacatctttcaaattggttggttcgttgatcgtagcgaaagaatgcagagctccagccaagcccaagacgaagtagtgatcgaatgaacacatctgttcgaacaattcgagtaggcgcaccgtctttctttaccatgtttcgttgtaccaaggctgcatcgaagccctgtgctccagattcgctaaaataggctgacacgggctcttggaaagacttatgttgatacctctcccacgatttctgcgggggtatttgaccaggttcttcctgaagtaaatccaaagaccagatatcgttgttgtcgcctgatatgtctcttaaagaatcacatgttgtgtcagactcgctgtctatggagggattgatgctcgagtcggtaactgattctggtttctccaagccggttggaaagagatccagcttccatacagggtcgatcttgtcttcaggctgtgggtatatctcaaaacaagatgtagtatcacctataaataaatgagtgttattgaaggccctaaagtatctgcggttgagacttaccacttagagtagtgttccatggtaacgatcccaatggctgcagagcttctatgctgaatttggagagtctccagaggctttcactcgagaaaggatccagctcatgatcatagtccatagtgagaccatgctcagatgagcaagatgtttgacgcgtgaaagtcctaggtcccgcgacggagatggttatcgccgtgcacagaccgataacagaaagtgcctgctcgaagctcaataccacctatcccactacaattcagtcattcctacttcctgtgatcctcggatattgcatcgaagctacaatgcctccaaaaaagaagaccaagcgcgcgcactcgcctacaccgcaagacgataccgtggcggagtcaagcgcaaacaccccgtcaagcgacagcgccggcaagtcagacacggactacgacctcatcacagatccctggacagatgagcaagaaactgctctactcaaagcgatcataaaatggaagccagtcggtgagtttaattctcacctctgttgagtcgacagcgcagctaacggaccgggcccataggcatacacaagcattttcgcatgctcgcaatctcggattacttaaagagccaaggatacgcgccctctacggcggaacatatgcggattccagggatctggaagaagctaggctcattatacaatttggaagctcttgacgaacgggtaagcggcgaatgatggcttgttcgcgctggttcattttgctgattagagatatctttacaggaagattcggcgatcaccgatgtgaacgaagacgataaagggtcgagtgagatgtattgtgcatttgagctcccgtatgacgagtacggcgacatgatgtttgacaggcggcttgcgatggaagagtccctgtctcctgtcaccagtcgcgccagtcgtgcaggcggatcgcgacgaggaagcacagtcgcagatacagatggtaaggagtgacattatctacagcatgggctacaacccataaactgacttcttgcccggcacagaaccacgatcttctcctgtcccgtctcgaaaccgcaaaccacgtccctccacgcgtggaacgcgctcaactcggctgcaggtggaaataggcccagggagtcaaggcaaaatatcagatgaagggggtgattcggcagaagacactggtgcgaatgatgaggatgacgaggaaggcgaggatgggaatagcgaagaagatgagggtgagggcgaaaaaggtggttcacggagtacccgagcgcagacatctcgttccaaagccaaagataataggccttcgactggcactgcgacacgcaggactgcccgacggcgttaacatggccgagttttcgatgtgggttttgtcctttgataccaatggtgtttggatggcgttttcttttgctttatagatgtgtgtggccaagtaggcatcttgtaccctattgctatagtagcagaaccgatcaatctacgatatagatctaccaagatattatcaaaggaaattcgaggtttttcgggaatcaggcctccaggtaaaccaaaactcggtatatttcgatcgctataggtctaatgttgttcgaacggtacaaagggaatagatcagtgtgtcatagtacaaggagtgtccgcagcgcgtggtttacaggcgcttgatgatagccccagcatactcctgggtcttggccttacctccaaggtcaccggtgagggtctaaaggtcatggggtcagtaatgcgcggtatctgtaggaataaatgcaaaaactcaccttgccctcggcgagagtgtcgaagatagccttctggatgcggttagcgtggtcggagagacccatgtgctgcagcatcatgacactgctcagaagcatagcagtggggttggcgaggcccttgccggcaatatcgggggcggagccgtggacggcctcgaagatggagcactcgtcaccaatgttaccggagggggtgagaccgagaccaccgatcagaccggcgcacatgtcggacaaaatgtcaccgtacaggttgggcataacgaggaccttgtcgttgtagggggtagggtcagtgacgatacgcaggcatgtgttgtccagcagctcagcgtcgaactcgatgtcggggaattccttagcgatctcacgagcggtgttgaggaacagaccgtcggacatcttcatgatggtggccttgtggacaacgcggaccttcttcttgttgatggactgcgcgtactggaaggcaaaacggaggacacgctcggaagcctcgcgggtgatgagcttgatgctctgcacgacaccgtcgacgacaacgtgctcaataccggagtattcaccctcggtgttctcacggatgagaacggtgtcgacgttgtcgtatggggtcttgtagccagcaatggagcggcaaggacgcagattggcgaacaggttgaaagtacggcggagagtcaagttcagagagatgtgacccttgccaacgggggtctagaaaggcaaaggttagtatcataatccagatgcaagatatatatgggaaattggaagctagaacatacagcgagaggacccttgagggcgacgtagttacggcgcacactagcgacggcttcgtcgggaatggcggtcttgccatccttcaagatgggggtgacatcaacggattcccacttgatgggggcctgttattgacttagtatttcgatcacgttagagagttaacatgctcataccttggcagcctcgaagatgtccttaatggactgagagatctcaggaccaataccgtcaccctcaatcagagtaacaatgtatttgccctattagaaatagcagatcaattagcattgccgttgagaatatacgtggtgatgttctcgaattatggtcgctgtgcgctgcgcggctggcaccggcatagatggataaccgggctcggttggaaggaacatacatcaggacctttctgacccttaaacttggcaacagcctcctgtgcagggctggcgtagaaccgaatctattcaaaagctcgagagttagtcaattgagctctgaatagttagctactgagtgtcctgaggggttggtacctgcgcgataggagcagcaaatcggggtgtcacgcgggacgagcgcatgcactggcgagcgacagagaagtttctggtggcaatcatcttgatatattccctttagtttcttgggtagaagttaaagaggtggtgagaaagaatgaaggaaggagaagttgggaaggaatgaaatctctcggcgccgtaccgatccgaccggctctcagaccgcattggttgtttcatttcccctccggcccgagtccactcttttacctggtgctggtgtccactcttgacgaccagctatagggtctcagctgttgattagggttctgctatcagaggatatcagatcttggtcacctgcagaaaggcatagcccctggttctttttcgtatttcaattagtcctgactcctgcgcttcacccaccgggcaatcatggctgacctcgacgtcgcaagccactacaacctaccctccgagttccccgaggaatggccggcatctttagatgcagacgatgagccagaagaacagccagttcagcgagcagactctcgtccacgcaagtcccgatacatagctcttgaacgcagtaccagtgattggagaagcaactttggttcacgaagagggaaggaggggagagacaatgcacgggaagacgagcccgatcccttgggtacaagcgacagcgttctccggattcttaagcagcgaggagtgccattggaggaagaaggcaaatcacggttcctgctgtcatcgacatcattctcgccagcactattcctatcacaggctcatcactcggcctccattgaatcccttataagcggcctggataacctatcgcattccatcgaccagaagtcggcatcgctgaaggtactggtggaagccaactttgagcgtttcgtccgtgccaaggcaactatcgatagcgtctacaccgagatgagaaaccagggcgttgataaagaaccaagcctaagtcctcgcaggtcagggcatttccggagctattcaggtcagcaatggagcacatctctcgcccccgtggttgttgctaagaagaccgctcttgtcaaggagagtgagttcggcatgaagggtattagaggtccgctagttgaggcctctgtcaaggccgaagaggtgtggggaccggctcttgggggtcgggaacgagagaaggttctgaagtcggtggtggagactatggagaagcaccgcgatgtctatgaaattggaagccacttggccaagtccatcaagcaacgtgattatgatgctgtctttgagcagtacacgaaagcaaggacactcgccaaccaggctaagaatatcgcggagcaggcgtccagttcccgtcggcaactaaacgactccgagacacataccattctggctatgggccggatggtgatggacgttgaccaacaaatccatggttttaagcgtgatctctggagacgtcttgccgatgcccccactacatcaactacaagcaccgcctcagggcctgtggaagaacacatggaattaatcggggccctgttggaattgggtgtcgaggaaaaccctatctggaaatggctccagagtcgttacgaattcctgaagacaaagatcaccggattcagtgatcgatgcaaggtcgaaatcgaaattttaagaagaagacttgctggcggagagagaccaacttcgcaggcgacagcatcctatctccgcctggcacctcgtgatggtgcggtagaattaccagcgatcctagatacggatcaagtcattgagctgtgggaatgcatacagacgttcctaactcgacttctgtcctcgcaaagtggcttgctgggcgaggtcttggatttctgggaagtcgcacaatcattcattgatggcaatcgacaacggcttttgcctgtcggttttgaaggggagagtcgcaaacaccaccatctttccaacgacaatattaagcagttagagcagggtattgacgtgttggtcaatattattcgagaaaacgtcgtgacccttttcacggaacccccaaccgaagatatctccgtactcttctcgccagttccagcaagtccatcaactccagagtcgaggggtattactccgacagagtcccgcttcaagttggacccgaggaacctaccatatcctccgccaaagcttggagagcactgggagagttttgcattctggccaccattttctaattccctgagtggagtgcactatttgagtaaattcctcatcattgtgggcaccgctgcgagcgaaatggcagacctaaggccgattggcggctctggaaaaacatatgacctcctcaagacccttgtcagtattgcccgggaacgatgtgcacgtgtggcgtgtgctgcctggagcaaagatgcggaggtctgcaaaatgctggaagactggacacgcgattcagagaagcgtgatttgactaagatgcctgggttctttgtggcttttgagagtgctatcctggtgggcatgcaaaagattctttacatctcggaagctatggcaaagccgggttccgtggatgttgtcactcagccgcccgcgaaattgcttcaaatggtccgctctcagttcgtatcgagtgtttacaaatcattaagcggcttggtcgaaaacgcagagcgcctgacaacagtagatgaagaaaatgaatggattatttctcgaccagcaatgacaagccaagcgactgacgctgcattgtcggttctctcggctgattcggtcgattcttggaatcgcgtaagtatcggtccaatctgatgtgatacctgcataactgaccacagaacagaatgttcgaatccttctcacactctcaaatctgaaggctctacaggccgactatgtcccacagcttatctcgaactttgagtcatccttctcggtcaagctgtcggaagaggccaagaccgttcgggacgtgctgagccagattgaagacaggctattccaatcatatatcaccccgactactgtcttattacacaaaacaattaccgctggcattgcatctccagattgggagccgtctgtagataggccggagcaagtccgcccatatgtctacaacgccctgctgatcatggtgctggtccatacagagatctccacaactattccgtccactgtgtcaccgggcgctagtcgcgctgcgtcaagctcaccttcatcgctcctagtcactgtgttgacacacctgctttctcaaatttcttcatcactgctggatgccttccgtgctcggccatccttctcactcccagctttgatgcaagctaccttggacaccgagttcattgcacagactcttagctcgtacataaccgacgaggcatcagatgtacaaagtcagatctacgtcgagctggattgtcgtaccacaaatgaagcccgcacaaaactgaaggccgaactaggagaaatgcgagttatcctgaaacggctcagggatcggacgaaggggcagtttgcttgcttcaaaaagccgagaagcggtggaggtgcaaatagcggagggacctccaagcctcccactgcggctgggacatactactaggtctagcaagacagtactattcaagaatcgtaatctgaataaaaacttttatttcatatccaaccgggtatcatggaaacatagtccacaccatgcatgtgtagttcgtgcctttcctctctaattctgaccaaccatccgctgcacgcgactaagcaacgcggtgctctctctgcctaatctcctcttcccaaactggtccggccgcttcgcgcgtagcagggccccacgctcgttttgtttcgcctcgcgttccttctgccgtgcttcctcggctttcctcctcttctccgcaaactccatctcccttgtgaatgcagagggcttttgccggcgctccctttgtttgccctcgcctcgtggacgccattctggtttaggtgcaggtgctcgctccccctcgggctcgttcaacatggctatgcgatccgggtgaagttccaaagttgttgcctcttcgccagcctcttccttgtcctttccagtttcgacttcgtccccctcggtggtatcgtacacggatttcctaggcgcgatggcgagttcttgggctttgatcttggcataggccttcttcactttggccttgtgaatcaagtcatttttgatcttttgggctgttttttatcgtgtggttagtctcattcaagacatggctttcgggcgtgctcactcttgcgacgatatgtgccatctgggaggtttgcaggtccaacgctaaagcccttgcgcttcttgatcgcgggctcgccctttgatactggggcagcatctccatcgtgggtgcgtttcggtgccatgctgatattcaagcaaagcaaatttgttttgtcttaacgtgtgttgagaatcgaagactttcggagaaggaaaaaaaaaatgtggcgatctccgcacggaacatcggtctcggccactagcaaggaagtatgaacttttgaacaatatacagcacctttgtcttctcggttttggggctaaaagatcgagattgtaggtaattagcattagcaatatcattagcaataccatctacaagctctacaacatgttcgacattatcagtgattctattgagctagtctacgcattatttacttttttctctctatttctccccaacatctcccatagcccaggcatcgggccttgatttccttattgagaccgaaataatacaaatatacaacattcaatatgactcctgaaggctccctatccaatcactacaacacaacgtcactggtccatcacatgacgttcgcaggccggatctccgagatccacggcgggtgtccaccccattcaacgacacaaagcacacgacctgctcaatactttcttcgcctatcaacctgtgaggttcaaactgggcattcatactttgagacagcagcaaaagtcatgcccatggcgtgacgtattttcctctataaactgttatcttcttctcccaccagtaaaaaccaccgacagcatatacccgaatcatcctggtacaccgcatccaacttggaacccccaccacggcacagctcggctttggtttcaaaaaagtgctacgtgggtgtcttccggaaatgtcacatttagtattttatgtcttatagtctgcccttatcataccaccatgcccctatttcgagatccggatcggaggcgtcattatctatggtcgcccgaccatggcaatggtgaacaaccgaccacagggtcctcgcagctccagctaaatgatctcagtcacattgagggtgaggtagctgctccagaaatgacaaccaactctatgcattcaacggcgttgaatccgcctaagtcgtgggcgaatgatcgggaggagctcatccaccgtatcaaagaatcttcgccttggagacttcaacatatggtatgtgaatctcttcgtggatgcctagcactgttccaaatctctgctcgttgtgattccgctttctttatttgtccaacacatgcataagctaacatgcaaacagtccccggataaggacaacaaagatttatttatatctcaaacttcacgggagcagtcccaaagagcagcaagagagtatggaagccactctctcaacgaagaacgtcatgtcaatgcgacagaggaactgggatcgccggccgatatccagagacctcggtcagcgttacactccggtgatttcagggaaggtgccacagattctcatgactcacacgctccacggtctccctttactgaccggagcttggcttctccatttgctcatttgagctcctcgcccactactccttggttcggagcacaggcgttgccctccggtttacgaaagacaggtacatcgaatgaacaccttcagtccgatgttatcctggatgctcgcgctggtgcaccgtcggtgggctcattctcgtcaagttatgttctgaaagctcctaccagtcctctggtataccaagcgaataacaccgacttggacttttcgtcccgtgttgaccatgtggacgttttggaacatttagacagaaaaaaccgccgccgtactttgccaccagagaccttccgcaatctccaattctccttgccaagcaatcaaattctcaaccctaacggtccatctccacccaaacggcagcatgatgtcttcacaaatcaaacatctttgcctcgccggtcattgacttcatcgtatagtcttcaacttgcaccgacccccggggggcagatcccaccatcgcgagtaagacggccgtccttcgtctctgacatctcgtcaaaccatcacgcgccgatggtgggctcttacgaggaatcgatattacgcgggagaatgtcaatgaatccttccaagccgctagatttcacggctcagattggtgtcctaggcaaggggaattgcaaaggtcatctaaaatgtccgccacatgttacagtgccatttccggttgtcttctacagttatccgacctccgggtccggccgctcaatctcagatgacaatccaagtccctatgtgggacagattgacctggaaaattccctactaaagggaaattccaatccgactagacgtcgcaggcgacatccaagtctgacggaacccctagaaggcattcccgccacaggtggagcaaatgatacccctgcatgtgctgaatcacgacgccaccgagaaaagaagaatcgcaggtcagaatcgcctaaatgtcccccgggggggtcttaccgcattccgcaacaaggtcaactacaaatcataatcaaaaacccgcacaaaaccgcggtaaagcttttcctagttccatacgacctcggtgatatggaacctggcacaaagaccttcattcggcaacgcagctattcggcaggtccgattatcgatatgccgctcagtgcacggaaaaattatgggaccgatcgccctgaagcttccttgaatcccacagaagaccctcaggacaaacccacgttacgatacctcattcatctaaacatctgttgtcccgcgcgcggtcgcttttatctacattcgactattcgcgtggtgtttgcaaaccgcgttccggacggcaaagagaaactacggaatgagatccaaaatcctgagcctcgatacagcccgtacaagccctcccgagagtcttccatctcgagcactgcgagcgcaaatacgcgcctgggaactgaacaagcgtctcgcagactgagtgtgggccagggagcgactcctcgtctacacccacatgtatcaagcgggttcccctcacagctagatgcgccaagacccgtggatgttacaggtggccctgaaaatgatgctccctcgcatagtgtgtctcggtacaacgagctcaccagaggcgacaagtcttacgaacgtcatgctcgtatctcgaatccaatcgtcccagaatcgggcgagagccttcttgccaaaagactccgaggcctcgatgtgcacaggtcggagtccacagtagatgaacgacatccacgcaaattgggcctttatgatcgaccatctcctacccacagccaccatcctcgctgaacgaacccagcgctatatcctccaagaaatttgaccccgccattccgtataacaataacaccatctatctcccacgtatatcttgacctcgacttgacatatcacctcgtttcctgtctataccacccctcaaggaacagcatggcagtaggcgcactggtttgcagccgatcccctgtttatactaactcacatcatagttccgagtatctttattcaccttgattcatgcccgagcgatgtgtgtatttattttctttgccacttcgaagtccagttgatctgctttcattgcctgtgcttcatggatatattagggagcccgggtgcatgcatgggtcgttgactatacccttttctattttggtatcttattctctttctgcttttggccttgacacttaagtttatctgttagatggttaagttggtgatttttagtattgattacatatatctcgctagtgcactgcgtcgctgcgcgattttgactttcgtgtctgccaataggatatatatatagaagttttcagatgaaagaatattcattgatggaatacagaagaagtaagatattgtgaaatgtcagagaaggcgagtttgagttcctgcaatttatatctacagcgctagatacagcaactaaattatccaaaatgacaagtgtcaagccacccaggaagaagaccaagtgatctcgacccagccgacatgatgtattacgattcctttgagtctaagaaaagaaaatttcctagtcctcttcgactaatgaacctagcttaaccagcatgctccacgatctcgctcaccagcacgccgtccttgaggtagctcttgaactgctctggcagagggcactccttggtatcttcatcggtgccctccggcggcggaagggtgatgttaatagcggaacatttgctagtaaagatctcagtgttgagactctcttggctaaggtaaacggtagcaccatcaacctgatccatcagcaaagtggggaccgtgccgtcgatctgcacagcgaacttggggcacttgatgatatcaagactgctgacgagagagtcgacgataagggagagaccaacgcagttgtcgatggcaatagcgttagctttgttagagaccttgatgatggttttgttgcagcgactgatgaggatggactggttctgttgcgcagagacctcgatgatctcgccaggggcatcaaaattctcgatgagccacttgctgccctcgagttccctgcggggcggcttgcgcgcgcgcatgttttcgggcttcggttttttgctgggtgctggggacttgccccgcacggaactgccctcagggacgatggatccggcgcgcaggttggggttcttgtgcgtcatctccgatttgtcgaccttgcggaggctagaggtgataccctcgccctggttgagttggtcgaagacagcgcccatgtctgctgctggtgccgcaggggccggagcaggaggaataccaggaggcggaggtgggggaggagcgccgccaccggggaagttgagggatgggacagggggaggagggggagggggaggaagggcaccgccactgaccgcagcaggtccggccttgacctgcctcaaagcttccatggcatcaatgcccgtctcattgttccatgtcagacccttggggtagtgtttcttgaggtactccgcaagagccttgaagttttgatagtaggctttgatatattcgacgtgtacctggtccctgttaaattgtcaacatggtaattcccccaaagcgtcattaacaggagtgctcacttgtccttgtactccttcagaaccttatttccgtagtattcaatgccaccgatcatgtccgtgacaaactccgcaggcttgctttcgaagaaccaagcgagcgcaacaataccctccgcaacagcgcttaggtggttgaatagcggcgaggctctgtttgattcgcgaatgttgttaatgctatcggatgctttgtgcagatctgtcattaactccggaggctgagtatcgggtttcttggcttttgtaacaacataaagataggtacgttcagcttggaaggcccgaaggacagctttggactatagatccagtcagcaactactcgcggtagactaagttcgcacaattcctcaacatacttgctcagcaaccagaccgccgatcttctctcctaggttgacaaagttctgaacatcacccttgatcaacgcatcgaagtcctcaatctgcggcgggacgggggcggccacaggggcagcgggcggaggaggggacggcttagggggttgtggaatagcgggcgtagaagaaggtgaaccggtcaaagactttggcgcgctagagtcatcgtatgacatcgccatatcctccaagcgtgaggtcgctgcctcgagcctgcagatgagttcgatgtcagtcaagtgtgccggacgtaggtgtcaaacagcgtagcgggaattgagctaagagcaaaataccagtgaaatgccattggctagacactgttcgcaccaaggatacataccgcttgatgagggtggtgaaattatgcatatggccgccggacgccatgataggcaacacgttgcttcaacggaggaagcggaaaggtaaaaggggtgatttgagtaggttgagatccagggattgtcgagaagtaagatcccctgctatttggtaaaatgtaggcctttgagttctaaaaatcgacacacgggatgatagggagtggaaagaagacgaaggttggagctcctgaggcccgcagatgacggctctagatgtggtatggtacgttacagcgggatccgcaggggaaatgacgttgtgggggtatatttggtaattgaattaccgttcgatccaccctgcgataagtcgaaaccccccatgttcggctgttctttgtctttcttgacaatcagcttctttgtcgtatttatacatacaaagaggaaggccttagctgcaaatatggtggcccaagataagcccgttgaggtcgagttctgcaccttgggaatgttcataattggtatggtttacttcgtcgctcaaagtgggatgtagactcacaggtgcattgttattcagatgatattgatttcggcggctcaagacccagtgttaagaatatcctcggtggtgcagcatcatttgcagtcgtgggtgcccgcttggtctcaggctcgaagtatgcacgagctgtgagctggatcgtggatgttggctccgatttccctacggagacgcttgatgtaatcaagtcatggaatacagcctgcgtttttagaaaagaccccagcaggctaacaacgagagcctggaatgggtatcatcctgacgagaaacgaggtaagtttgcggtgatacatattccaccgaggaaacccacgcggtaactgactgggaagacttcaaatacttgactccgaaactaagactcgagcctgaaatgttgtccgattcacaggtgtggtccaagacattccatatggtctgttctgcatcccgttgtatgtccatagtgcacgatattctgcagcggagagatgaattgcaaaagacagggaaagcaccgtctgtcgctcatgcttcccagcgtcctatctttgtctgggagccagtccctgatctctgcactccggaagaacaggaaaagttcttcgccgcaaataaagtcgtggatgtggtgagtcctaaccacatggagctcggcatgatgtttggccagcccggttggacccaaaagagccaagcaggccaggaaatagtccaaaggattacagaatccggcattggccccgatggaaatggcatgctagttatcagggcaggaaaggatggtagctacgcctactcaaagtccggcaagatttggctccccgcatatcatcaacccagtgcttcaggtgctacgcctgtggtcgaccccaccggtgcgggcaactctttcctcggggctctatcccagggcatggtgactgcaggccgagagccattccaagtcattggctctgttctatcaaactccgaaacttggaaagcccttgagtcttggggtaattacaagcattatcctatggcgctcatttgcgcaactgttgcagctggcttcgtggtcgagcaaatcggagtgccacagatcgatattgatggaaatggaaaggaattgtggaatcggactgaattcacggaacgtgtccgcctgtacacgcagcgattatcgaggacatctgaagagtctctctgagaactattagtcaatcgactaatttccgaacgagaaacgctcttgtattgtcgtacagcacacaagtgatcaaatagtagaaaaacataaaagaaaaggttcctgctgaaaatccgcctacaaccgccatccagtatgctggaccttctttatgagtcgttcttcgcggcttgttgtttctcgtgttcccgaatttgcctgctccagctacaagtgaagaaaggtaaaggtcagcatgatatataccgagtgacatgggttcggggaacggactatcggctggggaagaagcggccgggctctggcatcttgtcgcgatgttcccgatcagcgctgatactgaaggcgatagcagcgataccaaacacaaagacgcccatgatcgcagtgttggccctccagttagctggctgggcataccaaccaccagcgggggaccaaacttccttggggtacctgccagatcgaatccattagctcctggtgaggttatgaaaaacacgagcacatacgggatctttccacctccacccattgtgacgaatatgcaattgaagggtttgttagaagattaagagagcgtaagcctggtagttctcgaaggtgaagccgaaagggccgtctcggtcgcaggtctgatgccaaggcgctatgtctatattaggcttagcgccgcctcacacgacttggccatcccgtgactgccgcgacaatttctcttctctctcgttgatggtatgccaattgattgcgtcgcgattatccctcccgtccattgtataatcttttttacgccctcggaataccacaatcgcccaaatgaagagactgcaactccaaagatggagcagttcagtcctttcgccgcgggctcggactgccaaccgtctgcatcaacacatctacgggcaacggtatcaatcgaccgctcccccggtccaaacccgtgatgatccgaccatacagattttcgaggaaccagcagttttggatgagcaattggctcaaattgtgaaggactctcacacccgccactcgcagctccaatatccttctcccccagtcgaagcagctcgacaatctgcaaaactcgccgctctccacgctcgactctacctaccctccagattacccgtcgagacacttgcgcggacactagtcgatgcatcagcagatccgaacccgaatttcaacaatgcctcgctggccactctcggtcacgacctcctttcctactacgcaaccgagcaccttatttgcacctaccctcgcctacccttgaccgtgatctttgccgccatgtatgcatacgctgggcctaagactcttgccgcgatggcacgagaatggggtgttgacttggccgcgttgcccggtggtgaggtcgatcccggtctgttgcagttccagaggcttgagcctggcaccgagcttgcctcaggcccaaaccacccgacagcacggccatatgaagcacagaagaattggaggaaaacggtcacttctaagattttctatgatgatgaatttggtgacccgctcaaggggatcaagcaatctgccgccggtgtcaccaccgagcaagcgagcgctgagttcgtccgagctgttatgggcgccatctatctgcatgccggccgcgccgctgccaagcgattcttcgagcaacacttcctttcacgacacctcaacatctcagaattgttcaacttccaggcaccagcccgtgacttgacccggttgtgcgctcgtgagagcttcgagcgtccagttgccaaggtcatcagtgagactggtcgtaagagcagacaccctgtctttgtggttggtatcttctctggtcaggacaagcttggggagggcgctggcgccagtctgatggagggccgcgagcgtgctgctgttgccgccctcaagggttggtacctttacagcccactttctgtgcgcgttcccagtgcgatggaggagccatcggccgcaccgtggaagccggtccacgttgacctgggcgaggtcattgtttaaggtatttgttggtgcaatgggatgccttggttcaaggcacggtaacatattatttcatgtccctttttttctcatctcgcttttctttttccggtgtgctattctttcgcatgggaagctagccggcggtaaaaagagtcatctatcctgtctcctgcatgactggatcctgtacattatgggaattccaatcccttcgattcacctggtgtctttttctgctaaatttcccttattgttttttttaacctctgttctactcttctccagttagacatccggaaaaactaggcatgtcatggccctcgctttggccctgccatccaaatatagaactgctctcagacatctattgaatgcatgaaaaaatcaatgttaatggaagctctcttgtcttttgattctgttagttctatatctctagttactaccaaatgaatctaccgatgcctacatatctattcatctagactttacatccacccatcattccgggttgagaatctcatcctcccagttcccactactcctcccgacacacacctctgtaggatcatccagataacgcccatactcttcccacaactccccaaccctaaccccgaaaagacccttccagaacccgataccctgattgtctgcatcctccccttcaccaacatacccaactctcaaaagccgatcattcaacatccccacagcgcccctcccaaccctaacatcctcgagccacgccagaaaatacgctgtatgctgataccccatgtcccacttcggcggccgttcagcagcagatagaggccgtttccagtgcggcggctccagaccagccttgagccgcacaaagtcagctatgccctcgattagtccgcccggcggacgggggatgtcctcgccgttattcttgagggagctaggcggcgcggtgtgctggtagcaatgcacaagctcatgggtcaagactccgaccagctcgtggagcgggtcttctttcgcagatgggccggatgtacagtgctggatgtacgggagcgagacgtggatttccttgtgcgcatcgtcgagctcggtgcctgttgtgtaggctacgccactgtaatcgcggaggaagactgttacggatcttgttggcgggatgctgggtgtgaaaatgggccggtgggggttctcggactttgggggtgaagtatataggtgtttgatgatgttcgctagggctctgtcgagtgttgatgcgaggtctgggatgaaggcgaggaaggcgcttgaggcgggatggcgtaggtcctccacgtgaagacggagcttcggttgggggactggtaaggtgaggttggttgttaattttgtctgcttttctcctttgctgctcgaggtctgtggctcttgctcttgggtgttgcccttggggattgcggaggcatgaggtgcgtgggcggagctcgtcatgatgtatttgctttgattgacagcgatcaactgggcagatatttcgtgttaaagatcttcgactttttatatttgtctgaggtgtaactatggaagtttaggttgagggcggggggattcaacgttataatgactagacccgcccaggtctagggcctaaggcaggatccatgagttcatatacctatatgcacatcgatatctgataatcgtatgtataagccagctaaacctttgaaggcgcttacctacatatataacgtacagagataaacctaaatactttaggctagcactctcaaatacacaccttgtcggcgctggtgattctcaagaggccgccatgctccactttggcgatctcgtggggtgctaggagctttgattcacattgattggaatgaaagaggtgtatggagtaagattcaatcgatcgcgtgtcagttgagcctcatattgatctttatcgtgttagacaatgcagtgagaagcttgtagttgtttactatggcttgaattaccatttttatgcctttttttcagaaaataggcaaattggtgattcaagatcttttactgagcaaataatcggtttactggtgagcatttgacatagagatgttgtaaacatgacgctattggttgcctattgcgacgagtgatcctaagttaataaacaaaccagtgttgggctcttaatagaaccttcgggcacacctcaccatgtaatggcggctggatagaattagacaggtataaacctaggcaggtacttctgaggaagtaacaacccccaataaaagttgaaggactcaagggccacccctttaatatcatctacatccctcgcgcttatcgtcacgcgcttatcgccccttgttttcactttgtccacttttcaacatcccaccatatcgaggtcaactttgcgctcttcctcatattcgtcttctatctcatcggatcctgtatgttattatcctccctgctctgttttgaacccttcatggtcctcttcgccattcctcccttcccgacatcccacacccttttgcgacagatcccgattcccatcctataaccatctgataccctcactctgtacacacgtccacgctatcctttcgcaatcgcaattgccctgcttcttatagccattgctctcttctactggtagaatctgctgctaactttcgtcatcgctagtgacaaatcgaaatccgagtctgttctcctatccgctattgaccttatcgcattttgattctcctggatcgtccattgcatacacccgcattcttccgtctattcccttcggtgcctgccgcgagttgagatcgatatctcggtgtttacaatggaggcgaaggcagcagaactactagcggccttcaagaaccccaacctgtccgttgattcaaagatcgcctacctctctagtgtcaagtccgatatcaaacagaaaaatgttccagagggggcgattcgcgccattttcgaaacactacgcctcgcgatcggctcccaacattattctgttctcggggcggggttctccacactcggtcacctcctgaagcgccttgcaatccaagaccagcagcaatggattgttcaccaggccgagagcttgtatcccattcttctagagcgtctcaatgacccgaaagaacgtataagagcccaggctgcgtcaatatttaccgaattgtggccatttgcgggtgacgaagtcgaatatcatgttctggaaggtgccctggttggaaaaaatcatcgggcgaaagaaatgagcatgctttggttggcaaatgtaggcttatgcaccctgcaaggtctgtctcaggtactaattccgatctacagatgacgaagaaccatggtttgttgttccgtcaatatgttccttccctggtttcgtgtttagaggacgccgatagcgccgttcgagatacggccaagttggtcgtgattgatctgttccggtgagtgaagttatcactctaatcattattcacgaatgcccctaaccgaactcagaaacggccccgcaagagcgaagtctgacctacaaaaacaaatggcgacacgcggtgtgaggaaatcaatcgcgaatgctatcctctcaggtattggcttaggatctgttgaacccgagactgcatcctctacgcgtccaatatctcgggctgaacgctcgatttcggtgatgtcgtcacgttcacatactatggaacagactgatgatggttagtattctgattatatttgtacccttggagatttgcactggttgtactaacatgcctgcagagatggagcctgtgaaaagccgcccagcttctagagctcatcgtgagcgaccggcagcctccgcatctacagagccaccaattgttaacagaccccgcacgccggctccgacaccagcacctcaggaaccgttgccaggcgatgatggtctagaaccgtttgatgttgcctcagcgagggatgtcgatgatcttgtgcgcgatatgttgccctggttcgaaggcaaagaatccgaggacaattggtcaaagcgcgagaagaatgtgattcttttccgcagactcactcgaggcaacgcgccgcacgacttctcgcagacctatatcagtgcagtaaagacactccttgacggtatcctaaaggttgtcaactccctaagaaccacaatgtctagcaacggcagtcttttgatccaagatattgcccgaacatgtggccctagaattgacccaatggttgagattatcatgcaaaacctgttgaagctctgctcggcgttgaaaaagattgctgctcaaaacggaaatgtcactgttgaagtcgtcattaaaaatgtttcatttagcgttcgcctcctgcagcatgtctgttccgcaacccaggataaaaatgttggagtgcgtttgttcgccacagggtggctaaaagctttgatcatccgccaggctcatcataaaagctcagttgaacataatggtggccttgatcttatcgagaagtcgatcacaaaaggactgggagatgcgaaccccggtgtgcgcgaagcaacacgggccacattctggacgttctacggtgtgtggccggagcgagccaatgtgatagcagacacactcgaccccaagtcgcggaacttgctggagaaagattcatcgaaccccaacccatcttcaagaggtgcacctgcattacctacaaagagccccgctaagagtcgcgccgctttaaaagaagctattgctgctcggaagaaggcacagactccttctcaacccgagttggctcagccaacctttgccgaggcgaagccacctgctcctaccttcaggtctactcggagtgtgcctactggggcccctctctcatctctatcttccgcgcctatgaggcctgccgtgaagcctcggcgggcagagattagtcgacctgcaaccgcagacccctacgctcgtcgccccgagtcacgagcccagtctagtaaccaatctacccgacaagcgacaacttcccccagggctatgaggtccaaaccgtcaacacctacgtcaagggcccctctaaacgcgcctcgcactcggccaaatgaatcggcacaagctgctacaactaatggcaggccgaagagactcgatttgtccaagtccaagtcgcacagcgatctcatggccgcgagtcgtgctcgcagtgactcgaatgaaagtctggccaatcagccatctgcaagaacaccccgtaatggaatttaccccagtgcacccgaggacaaacattcccctgcatctatcctattggaaagtcctccgcttgatgcaccacagcctcttctgtactcagcaccgcatggtcctcacgccgactcggttcctgttgaagaaccagaaccaatgacactggaggaacctgttattgccgcaccttcaccttatatcccggaaccagatcttgcagggtctcctgtgcccgtgtctccggctcagcattcagatctggattttggttctggtcccgtatctgccgtcaaacccctgcatgaatcaatggtgatttacgaagatcctacaacgcccatcgcggacaaaaatgagactcctgggtactctgcctcggtgggcaattttaccccctcaaagtcctcccccagtcgcgctgatcaatccgaacatggcggagcagaagctcaacttgtctctgaaaatatctcagcatcggtggtcgcttccgctaggaaacccacacctaatttggctcctacgcaggaatctgttatgaacttagaagctcgaactccctctccaacccgccgggcgccacttcaaccaagcccgtcacctacgaggggccgtgcccagccactggcctctaatatcatggatattgaggccgtgcttccccaagagcatcatgcaggaacgaacgaggccggtggcaacaatgagaatgcgactccacacctggccaagactgtagacttgcccgctgtcccgcggtctccagctaagccgagtgtcctcgaagaagtgacggcaaacgaagctacaccgcgttcgccagaagcgagacagaggtcatttgagtcgataccaccatcactctcccagtcgacgttgtcccaatcatcaatgtctgaagattccacacgacgcactcgaaaatgggtagatcgtcaccgcagccctagcccgcgttcgaaggacccggctaatgcccaagaaatgatccataaaggcctggcacgtattgtgtcgagaaccatggagccctcgggatataggaaactacagggacttatccaataccacggcgatgagattgtttcccaaagccaggactacaatacgttgctggaggctctatttgtggaactggaagcgacgccttccaaccgcaaggatcatgacgtaaaaactcaggttttggccactattcgttccatgctcctacgaacccgcgaacatttccacccctatgacactcgtgctatggcagctattatcagggcccgctgccactacgagtccacttcccactttgtcacttgcttagaagaagttgtagacaaactggtgtttttaactttgccccagacggcaattgtcggtgttctgcagggactagatcttggagcagatgcagagaatgatgagacataccgttccaccatcatgggcctcagtactattcaacagtcgctatcgcgtcccggtatcgatatcgacgacgagcttctggctcgcattggagctgtggtgatgcaacagctcgggcacccgcgccctggggtcagaaagaatgccactgagctctgcacattcttgaacattacattcgggcccgagcgagtgcaaaaagtcactcaacctcctcgtgaaggatcccttaatcttttgacatacttcatggcccggcgaacccagtaattgttctttttttttccccatcagctcaggatcctcttaggaggaccagcgattagtctgaatatcatcatacccatatcaggcacatctcacattcttcactcgtatccatatcgtactaggaaacccctcaggggattgtcctaacaggagcgaagctcagccctgggcagttagaaattggattttaagaggggatccatgagtgaatgggatcatgaagtaatgagatatatagggaagagaagagaggaactagccacctgaaactatacaagagaaaaggaaaaatgaggcatgtgacctcatctgcacactgacattggcgtgcgttgtgcaagtcggatttggtacacgctttgcttcatcagctgtaggtggtatagttccagtggtttggcttttccacgccatcatacaatacccctagctagcttttgacttcttccccgactttgtctttgggcatatctgttttgggatgcgtcttggtctggcgagtggattgttgaatcaacgctatgtaactacaaaaggtaagaaaatatttctgcggtccagaacagtgactaatagggatattcctcgaatctaaaattccaaagagttttcgccgagtcatcgaacccatatcctttggaactggtagctccaatatgctgcagtaaggacgggatcactgcccagcgcgtccagccctcacgatccgctatcttctccaccatcatgtctaccagccaatcggtcgtcaggtccgtctgctcaaggaactcaggtatgatggaacgaggaaagacgaggccctgcgagcagcacccatatttgttcatttcatggacgccacgggttatgggccacattgtctgtcttcccgccataaaatggagcgcaatggcagcggggatgaaaatgcaggatgtgatcaaaatagcgttggttggaatagtcttcagtttggtcctgaatactgttttggaggcaaccatcgtgcccgtaagcagagcccagaccatgaacgaccaggccaggtatgccggccactcttctgaattccatccaagaagctcatcgacataaaagagtcgcatatatatccatttcttattcatgttccgttcttccacaacttcgagagcctgtaaagcggacgagccagcccttcaccgccagagtatcatcttcaatcatcgccacgtaatcagcgccagtgtcgtaacagtctttcaacaaatgagtatagtcgtaaatcgttttgtttcgataccatccaccttcctcccagtcttttatacgctcaaaatctggatcatcttctttgtacgtcagcaagcggtctggcaacgtgctaagccacttctctgagtaaatcggatgttttgacggatctgtgttaccgatgagaatgttcagataaatgctcttcctctctgttttgctaagaccggccaggagagaggccactgttaagcccgtatattgctctctacgagagcgacagttgctattccaagacatatagtaggggtccagttgtgcggtcttattggtttattgatgctaccagtatctctttgaaactcctctgcctcctcgattctgatggacgaatatcgccgctcgtaggcacgagaggggtcgaaaaaataagaggtgggatctcgatggctggcgtaatgatagtagtagaggcagaggacgtaaaggaaggaccaagtgcaaaatatgaggttggtaatcgcaagatgaaatctcctggggcacacaagatgcgacgatcagccattctcgcttgcagtccgttgggtgaaaattatatgagggaggtgttggtgacgaggaataggggtaactgggtgtaccaggcgcaacaccccagtatcaaggactagcaattattggacatatgtcaagtgatagatgggcgattagagattaggttgaggggtagatgtctgaccatctcgaactgggtggtgttcacctgcgactgggggtctatgcccttcggggtatcgtaaatccttctctccccgtatactcgtatccgcttcctacggcggctagaaattgattgtgattggttaagaatgataagctatatactgtaggttgagtttatcggaatgccctcgccctatacagcatatacatcattagccctccagggcggctacacggcagccccacatgggattctctcaaatatacggacttaggcaaagatgcagattgcatgcgttagggtgtttctgattattttctgaaggactacagcgctatggtagcttggttggttaggcaaacacgctgtcggccattgcagatccccaaagcccgggtaatgacagttctattactccgtactccctatagcatggacaataacagcaggtttgagatggtataatttctttacggtcatttttaccgtcttggtctcaccttctcagccctggagactttgattcttatcataggcccagcccctgtctgaaaattcagtcgcagcgttcctagtttggacagtacctgccttgacatagaggtccaatcgcaccttccccagggtcagttatatgcctaatgtataccttccaccttctcgccggatgtttcctccttctgtatttatactttgagtcggttaaagtagaaagagcatcgaaaacccgaggatccctacagtcctagtccctgtcagagcagaaccagtattctctgtttctacagcccaccagcatataaacaaggctggtaggagatacaaagcttctttgcgtgcccattttcacaacttctgcgttacaaacaaagaagcaggcaacagtctcctctacaagggtattgtgatctgctaatcggaattcaatttctgatagacacaaagataacaaagaggtctttgaaatcaaatacagtattggtatgcaaagagccagagtgaatagtctatccggactataaatcgccctctttgcctcgaagttggtatctcatcagcattattttcgagtacccaactcgataattattctctaaccaaacagtgaaataccagcttacatcatgaaattttggaaatgcgtcaaaactccaaagcagccgcctcaaagattcccactcgaggtagcggaagccttcaaacccgaggaagagatcatccgtcgattgaatcgtaccggctcttccccaggaaatctcctttgtttattcccggaccctacacctagaacaagtcttaaccagttccgtttccagctgcaccgagaaaacggggttctacccggcctcgtcggttacctcgagaagtatagcagcgcctcgcacttggtctggagtatgtgtgctcttcttgcagatagcggtatcgatccagactggacagatgcatttgagatgtggcggccacagtggagacagttcgctaacagttttgaaatgcagggaaatatctcgcgtgctttagacattccaccctcaccagtccgtgtaatgtgcgttcgaaaacctcacagccttgatatgtataagctctatgccgttaaccccaaggcgaagaagcgtgatcaagagggtctggaggatctctggaggtggatgcttgatgcaccacccgaggtgattcttcagggagctttttccattaagcttgaggttgagccttgtttccctggcgaggagatatcgtttgctgtctctagtagctggtatgagtaagtttactgcttcgctgcaccatccctttctcttctctatatttcgcgatccaagagccgctcagtggtattaaatagaccaaaaataaatttcaattacttcctggtctgaagtctgaactgtatatataggcttgaggcacaatattacggagtagagacatggaggttcgtcggattaccggatttaacggaatatgtattccgggtaaaatgaggggtgacgatcaggtgacgaaccccatactatataatcaattccagtttccagcttgaaagagtcataacacaacacaatatacatcctttcttgcaatcttccgcggtagatataaacatcatgtctgacctacccaaggttcgttggggtatcattggtatgtctgtatttattcccaatggctctaagtgtcgtggtaagctaacgttttccataagctgccggcctgatctcatcgtggtttgtggaggatctggttttcgactggccagaaaagaaagttgagcatgttgtccaagcaattggcagttccaatcttgaaaaaggccaagcatttgcgaaaaaacactgcccgaaacaaagcccaagcgtctatagctcttatgaagaggtctatcgcgatgcagacgttgatattgtttatataggaaccccacatggggttcattatcgggattgcatggcggcgatttccgcagggaagaatatcctgtgcgaaaaagctttcacactgaatgccaaacaatcgcaggaggtattcaatgccgctcgtgagaagaatgtatatgtggcagaagcaatgtggctccgacaccgaccgcttttcaccgaacttcggcgcttgctccatgaagagaagatcattggtgatgtgttccgggtgttcgcggattttgcgttgggtattgatgttgccacacgtccgtccacatcccgatatcgcgacctgaatttgggagcggggtcattgctagatatcggagtgtattcgcttacttggacgagaatggcactgactggaaatgggtctgatcagtcagagaagccgcggattgtggccgcgcagagccatgaagcaggaattgaagagacaaccagtgccatcttgcagtatccctcgactggaaggcagggtatcgttacttcaaccaccaaagcccccggaagtcccggtcaagtctttgcggttatacacgggaccaatgggtacgtcgaggtcgagggtaggatgccatctgcgccggaatcctttactgtgtggaagaggcctcaagggaatcccgaccatgcgcttttcccgagggaacagtgtcaagggaagaaatacgactttccgcccctggggcgtggctttgtctatgaggctgaacatacggcacttgatatcctcgaaggccggaaagagagcaggactatgccgtgggcggagacaatttatatgatggagatcatggacgagatacgacgacagggtaacacagtctatcctggagagtgatggggctctagatatgtatctttgttctaagggtatcaaaaaatatcaccggaaaatacatctaaaagcaatctgtaattgtagatctatatggatggcagcagcagtaatatgaaaggcacactggtaaagatttacgtatgaaactgccccgctctaaggttaaccttgagtggatcccggcagtcgtccacccaggtggatcctatgcaacccggaagtctggtggtaatctactccgtacaattgatgatattccatatgccactgcgctgtacgtaaaatgatagggcgttttggggcgattgagcgttcttcctcgaaaatattcaaatggcggtgagcgaagcgaggcccttccaacaatctgctctcattgttagaaggttctcatttttctttcgtacattatctgctagttccgttgaccctcctaacctccttcaccaatatgacgaaatatgttgtttacggccttgagagcgcaatcaatgctttctttagctcgagtaccactacaacgagacagcaatgcgatgacttcgccatcgctcgtgctggtggtgtctctactcctttacagatgcaaggagtgtgcagttatacagtgacagcgggacccgacaagtccaggatcttccagtttcgatgcgaggactctacgattgatattggtaatatcagtcttgccaaggcagtccatcccgagttcattgccagctgcaagtatctcgggaccttcggcaatttacagccactccatatctacgagatggagaacctgtctggaatcactcatatcatagcgcgcattccaccaggcgacatgtcccgacaaagtaataccatcaaagaccttgctaggtatgtctaggaaatttgtggcctcgttgacaaaagctgacattatcgaataggttctttgcacagtcgtggaacaacgatcgacgaccatactcagatgacaccgctatcttacttaaggagtttcagtctaattttgaccttcttgctcaagacctgccgtcccgctttgcaccgaacttagatatggttcgtaaggagctcccgttactcttctcaggagcgctcccatttgttctcagccaccaggatcttaacatgatgaacctccttatcgatccagaaactggaaatatgacagggattgtcgattgggcggaatctagaattctaccgttcggtttcgcgctttacgggcttgataatattttgggcctgatgggttcaacggggtggcactactatgataaccaccgcaagttcgagaacctcttctggaaaacctttcgagaagaagctaatgatttctccgatgctgatttgcgtttgacccgcgttgcgagaatggccgggcttttttaccattatggattcttatttgacattaaaggtacggtggaaagtgtgcggatggaccaggctgatggttccctcgcatatctcgatgctttctgtacttcttgttatgaaggcagacagcgtgggtgacaaggtgtctgtttctattatattgaaattatactgcgaacatatacattggtagtcggtcaattaagtagatatatcacactagaaagaaatgattatagtactatagggatgcaaaggaccagatacctggtttctaggcgcagctcctgtactctgattccccgcttcgtacccgcgtcgtgtcacttggcaagggccgggtattgtcggtgggacctgtatcctccatttcgcataggagtcaagtgtctcttcactataaaccatacagagtttttgtcatttttactttcaccggctactcatgtatagatgaatcttcatcttctgtccttaggcaagaaatagaagtatggagaatgatacataattctagaaactgttacggatagaaatgaagcatagaagagagagcggaggcaacgacacggttgatctgtttgcctcgagttacacaaatgcaattttctcatctgaaacattttggaccatgaaagaacatacgagtagaaatttaatttgcaaccataaaccgagagctccaatcaccgtgtaggaaatagactttccatgctgttggattcgctgaaccgttcccagccagttgatgtattcgtagcccgaatccagtagcacccagacccattcttcgtcacgacagccacaggcgctattgtgatgttccatgtgtttacaatcatagggctgacaaatatgactgacgctctttgcccatgaagactagcaccggagaaatcaaggcccgtataatcgaatgttgtccagtgggataccacagcaaagcctagatttacagtgccacgtagcgctaaggtgaaagtcttggatgtgtgatcttcggagaatcgaaggctctgctggacagatatcggagatgtatattgcagtgttgcgaggcgtatatttcgtgcaatctcggcaaccgattcttttttcagctgctgagtagagaatttacaccgaagagcgccaacactacaacgaatgtagtatgtcccggccttcgggggttcaagaaagcggcgaaagtttataatcccaaagtagtccactggattgggcgatatagctgaaggttgaggggaatagacggatttaagataccatgcagcgataacatcatttcgtgtaagttgaatctcggaggaacaatctttcagctcagtctgtgatttcatccgcaattcgtcgacccatgcgcctggaatgtagataaacttggttgtgaactcctcaagtagcccaaacttcatagcaaggatagtcagcagcacatgccaaacagtcattgctagtttaaatatcccactgtcataattttgcgcatgtgtctggtagtggaaattggactccgtttcggtgcactcagttttgacttttatcagatcagacattcggacattcccggcatcaggtggaagagcaaacaaagggattggcctattagacaataggtcagaaaatgctttaaccacttcccaacaatcattgccgtcacatatatggtgcgttattccaaaacagagcaaagtagcatctcgtagaagagtaacacgaagccggaaattgtttgtgcggctagtagagacattgaatatgaatttgtcatcaactgaagatatttccgggcttttcatgatgtttggctcattgctatactggtcgtggtggattggaagataggtagccagtgattcatcaatagccctgctagcgaaatcgacagtagaaccacaggtgaaggaccatggctttgtctataaaatgatatgagcaggctgtagtagcggtaagataaactcactcacatccttgattagatcaccgccaagtattggccataatccaactaactcggtgagtttccccttcagaatagccgaatcgagaaccgcatcgacaatcaagcccgtatagatggtacttagatttcctaaagagctaacactgttgcaagtgtatttcgtagagcccaattttggaccctccatttttaggttgagagagactgagatggggtgagattctttcgtatatgaattattgagagagttctctcggggatttgatagaaaatgcgagtacttttgtactcctgtacccttttcttcactgtttattacgagtaacctcggggcaaatagagattatcttctagatatgaactgtaggacatatgtagtactaacatttatttgcttttttcctttgtttccccttttcgtctttgctgctattttactcgatcattaaacatcgtaattttttcaagcacatacagcgaatgtaataatacattggaacggggacaagtctcgtggaggttgaatagactcctcgtccttgactcaattggcgattacaatctctttgctactgtctggaagtctgcatatggtcctgaacagggcctagggcaatatttcttacggcagcggcgtttacctcactacaaccggcttcacaatgaatatcaacaggtggatcgtccgctttggaagattgaaagagatgaaaaggattactttcgaaaggacttcagaaacacaatagctaagaagctgacgcttgtgtcagaatggaagacccagtatacgcacaatgatctactcagacttcggaaagatatgtttatcgcttctcccaaaatgtggaagtggatccaacaattcatacaggactgggaagagatgccttgatctgctccaaaaatcagaattcatttttccttcatttttttcatgatatctactctacgaagtttacggatacaaatcagccattcatggtccatggcatgaaaagcacgaagccaacagccagatggatcgtattccaactccaattctggctagtggtaggatgtatataaaccgaaaacaaacatcgtgggagagctggggcattccatggttgcatggatatgtggagaccccgggtccactaatatacttcccgccgggcagtgaccaatcacattgtaactaaatgacccacactgtccgacctcaaatgtagacgacttcgaaggaaaacaaatatgtgcttctctttgattgagttatccttagcgcaggggccatgctaacttttcttctctatattctatgtcaccatatgcacgagtgaagtagagctcaatatagcccctgcctcaagggtcggctcgggggtcatcttccgatctcccccagcaactcgggtcggatgcggggtgactgacgctaggcactccaactgcccctcgctcggtaccactccgtggtacatcacttgattgaccgtgacaggtttatccggcagcatggaaatagaggggaagacagagggtataagaactgctggcaacggtcggcccttgaagcagatagcatacccctgggtcgttgcctgagctgtactgctataacgcctgttcaaattttgtgcaaatctaccataatcaagatggcaacaacattaaccggcggaaacccacacatcattcaactacccaaaactcccaaaactacctccgacgtatcccccgatccgcaaatcatcgcccagcaatggctttcggctctcgaatttcaaatctcccgtccagaaaatttgaacattagagagctattccaagctgagtcctggtggcgcgacatgctggcgctggactgggacatgcgcaccgtacgctcagccgccgagattcaaagcttcctgagcaagcaacaacccaaggcaaaattgtccaaatttcgactgcaggatacgggcaagtttcagccacgtctggagcaggtcgtcgacggattgagctggatatcttccatattcttcttcgagactgccgttggcactggaacgggtatgttgcgtttaacccaggcagagaatggagtttggaaggcctatgctatttatacgtcattgcaggagctcgactcggctcaggagcctctcgggaagcgtcgtgctgaggggacgaatgagtcgatgcctggtggtctggctgggggcacatggatcgagcgcaggaatcgacagaaggagcttttgaatgaggagcccactactttaattgtcggggccggtaaggaatttctatgttaagacggttgtctgtgattgagatactaacagtcaataggccaagctggattgaatataggtgcacgtttacagagcctcggcgtgtcgtgcttaattgtcgacaagaacgagcgcgttggagataattggcgtaacaggtaccgggtaagcgacattgaaaggactcgatctatgctatggagagaaatactgatttatcgcgatgcagacacttgttacgcacgatccggccgaattcacacacatggcctatctgcccttcccgcagaactggccacagtttacaccgaaagacaagctgggtgactggtttgaagcatacgccagcattatggagttgaatatctggatgcaaacctcaatcgtctcagcagagtaccacgaagctgtaggccagtggacggttgtcctcgctcgcagcgacgggtcccaacgcaccctccgacctcgtcaccttgtatggtgtacaggacattcaggcgaggcaaaggttccctccttcccgggccaaaactctttccagggtaatgtgtaccacgctagccagcaccgcgatgcgtcggaaagtgatgtacgtggcaagaaggttattgtcgtcgggactggtaacagcggtcatgatatcgcgcagaacttttatgagaacggcgcagatgtcactatgctacagcgcagcgggacatatgttataactgccgacaagggtgtcttcatgatgcacagtggaatgcatgaagatggcgggtacgttctcaaagtctttcctatctcccaccccatattcacataatattaataccaaacgtgtaggccaccgaccgaagaatgtgacatcgtctgtgagagtctcccctggcctgttcaatttgctttgagtgtacatatgacgaagaaaattgccgacgccgaaaaggagaccctagatggactccgtcgggctggctttgaacttgatttcgggatagatggcgctggcatttcacgtgcatactttacccgcggtggaggttattatatagacgtcgggtgcagtcagcttatcatcgatggcaaaatcaaggtcaatcacaatccgggcggtattactggctttgggactcacgggctgcttttggcgaacggtgattccctgccagcagatgttgttgtccttgccaccggatatgataatatgcgcacgacagtgaggaaagtcttgggtgacaaggtcgcggatcggtgttccgatgtttgggatctggattcagagggagagcttcgagctgtaagctgccatttactccgacgatcgtcttaaaataaatgctaatcacactgttcagatgtggcgccccagtggccatccgggattctggtacttcggcggaaacctcgccttatgccggatctactctaagtttctcgcactccaaatcaaggctgtcgagtctggaatatcaaacggtgtacgacagtagatggggagagggcctttgtgattgttcaaattgcatttcatgtgtaatcaaagaaatattgcaactttgatactgcaatttgacacattaatattatctattccgatagatgaataaactccgacgatgcgtcataccccaaatggcgtgtcgcaccacagtagcctctcagcttccagctcctcctcatatgtatctcccgtgaatgcatcactaatgacagcttgtatttctcggggcggctgcgcatcataaaaaagctttgtaaaatcccaatattcaggatagaagccggcaattcccagtccacaattgcagacacgcgcccaaggtcaataagaatattgctgggactcaggtccgcatgggtgaagacagaccggtacggacgcgcgtggacagccgcaatattttcccttgtcgcattgagctcgtatttatggatgaggaaggaattgaattcaacagtctggtaaaacggaccacatatgccggaggagaaacaataatcaaacagtgggccaccaagagtgcctccaaagcagtacggggtctgcagctcggatgttttagcaggggtcaaaaatgcctgcagaagaggataaagagagccctatagtagtttggcaatttagttagatttctgtttctcggtctgggctcaaaatttcccaataagcacctacctccggatccatgtcgctgtcattgaaaaggttcaatgggatcacccagacatgatcgaaccgaacggatacattggggtccgatggtctctggtctagcataagacagtgtgaattgcctcgagcttcaacgagtgtttgtgcttgagatgagactgagtctcgtctggtgactgctcttatgcttagcggagatatggaggccatcgggcattctggggaggctggttttcgactaacacttcgtaaccagtcgcttccattcaatttttgactcatccaggacttcctccggagaacaagcagggcgatcatgaatcctttcccagatatagcaagcagcatattctggatcaacggcctcatctaaaaatgctctccagatctcgtgctcggtgagtgtgagctgggcagattcaatgagccggatagtcgcgtgatacctagctattgaagattgaagccattctcggagatgagcgaatggtatttctatggaactatatcagaagctacaataaacctattgtggttccgttctctctgatgttggtccaactctgaagtcggaccgttggatgccaaggtcggatggacctcgggctaagcgctctcccaccccagatcgtggtaagtgatccaggtgtcctcccttgctgaggatgatctgccagagatgtatcgttctcttcgtggggctttgcgacctttttctgtctttgaaatgacgtgcagattaatttactccagttttggaaaagtttggaaaagtctaaaaaatactttttccacccgccacacgaggcgttgttgtttaccttcctaaaagagaagagctaaccggacacgtgaccggctttttcgttcaccggcaaacatatccccatcaggaatttgacaggcattcggaccaaacccaagccacagctacgaccgatacacctcggtaggttttcgattccgttgctagaaggcgtggttggttagcgttgtattgttaaaattgcataaagaaacggcaatcatgagcgaaagagggtcggaaattgtctatcgagcggaaaatgtcccaattcgcttctttaaagcatgtcgatggtgcaggagacaaaagatgcgatgtgatgcgcgcagccaagtcccctgcttccgctgtcgttctaccggccgggattgcattctggatccgatcgatgatggccggcgacgaaatgatcgccggcggaaaacaacaacccccgcaaggtgagaataaaattatcggtcttagaaatgagaacagcgagctaatatactgtcaaagaagcactgcttcgccgctagaccctaggacgggataccacactccggtaacaagagatcaggggttctcgcctgccacagtgcaagacggtggttttaccactccgattgattctttgcccgattctactggattaggcagcttacagcggtcttatacatctgatacgaatggaccggaatctcagcagcttagccccaatgaaatgatcgcgcctgcgtcagcggtacactctatgtccgtgaatttgctagacactaatgatgtgagccctaatccaaccatttacctaattggcattattctaacatagcaagatctttatggaaagctctgttaagggtgaccctaggggggatgtcgtcgctagaggaatcgtcagtgaggagcttgctcgtgtcatgtatgagaggtatggtactgacagccaaatgaaactgcaaacaattataaccaaatctaactcctcggctcaaggttcacgggtggatcgaagaactttcttcctctttttgatccgatcagagacacattcgactctgtccgttcaagatccttgttttgctttacggttattatctatctggctagtcgcgctgtgacagatttgcgcggagacacgcatatgcagcgtgttctacaagatgaggcacaacgtttggccgaagacagcttcttcgagcgacccactaaactagaaacagtccagggaatgattctcctggctgcctactctgaaaagacatggttctcgattgctcttattcttcgcaccgccttagattctggattggagaaatctttggacactttgctgtcccaagaaaatataccccgaagttcgctctcagcttctatggctgatcgagaactcgtatggaagacaagaacctggttgatcactttcatattggagttggacgtcgcatctggtacgggacgcaaatcacgcattgccgaggtcgatgtggtgaagttgcgcagattccttgactatccgctctcgctgccctttgatatgcgtactgtctgtattattgagcttcatcaacttcgaggtaaagcgaacaaacctacacgtgcgatttatgtgtcaactattaacataacatatggcaggcaattctcgtgtggttattgataacacttcaactgttagcgatattgtgtctacagaacttccggccattatgacaagattgcaaaactggtggacgacatgggacgagatccatgaaagtaggttggcctttcttgctttgatacaactacaatccggatcaactctgactcgaacaaatttgaagacaatggttttcatataggggcgtttcaacgcagcagtctcaagcttatgcttctctatgccaggatctttgttttctgtgcttcactggcacggattcaaaaattacaaccgacgtgcacggattcaaactccgagatccttgaccaggatgtgatgaatctatggcagtcccttgttacgaccatcatggaccaattaaactttttgatcaacgagccatcttatcgctgtcaattaccctgggcgccaacatatccagctctcacaatcgctttcgtcagtaagttgatcatttcctcaatcggttgcatacaatttgctaatacagacttagcaacattccctcttcgcatcgccagatggcgtccaaatctgatcaatcaaacccttctacttgaaagagcagaaaagatctgcgatttcctcaagcaaccaccatatcccgatatccaccggactgtttccatcttcgtcaactacgcacgcgccttgattgccagtcagtgtccgcagaacaataatagtacagatgtacccatcgtgtccggtcaaagtgagggcccgccattccagggagctgataaccccatgatcaacggcccgcctccatcaggggtgggtcccctcgaggatctccgctacagaaccggcccgaccattcaggcagataaagtttcaaatatggtctcaatgccaagtagtgacccatctgcagtggctagagcgccggtatctcggctatccggcaccatggaagcaccgaactggactgtatcaaactctattgcagattcttttggtctgtttgaggaggggcaaaacgatatctttgatttcttgcctatgatgccatcgattccacagtaacaactacatacctaatacaacttattgaatattatcactccgattccactgtccagctgtgtaaatcgtgcaagggccaagttctagccttgtagatcaaagccgatacgtgttctatcgaacaacaaattgggccgcaacgcgcaatgcgcaacgcagtgtacttgtttattcacgtgtgttaagtcacaccggtctagatatccactcaaaatccatcttagcaatcaatttctgcgtcaggggcagccatccatgtccggatcctgcccggcgccgtgagtggattgccctaacagccggccccgcaccggcgccggcttcccacccaaaaaaatcgaagtataccggtctctcattggcttgttgcctactttaatatgatagatagaggcattatgcaagatcaacacgttctagccaggtgagtcaaagaatcttcaggatttttcaatcaaggtccgctggttgcaatgggaacgagaaactttctacttggcttatatagcgcttggtcctcatctaccggtgttcttgagaatcagaataaaaacatacttccaatcttcttcctttgtgttctagctgcccccacttacttgatggtgcaatatggcgtcagaaacgaaacaatctctcagggctcagatagccgccatcctttcttcaggtacgatcaaccttatccggtatttccggtctgctctaacatatattagacaatgatgacggttttgacgagaggtctcttgcctcaacggagaaaaatccaaagtcaactggtgattaccgaatagttgaactgtcccaagatgaattgcttgtcgagttccaggagaactctccaagaaacccaccgaattgggcctttgtacgcacattcatacatctatatattccgaagaattgactaacaaaaccaatagagcaaaaagttctacaatgccattgtagggatatttatagtcctcaatagcggcatatcatccgcacttcctagcaatgcagtccccgctatcatgcaggacttccacgagtccggagaccagcaaaaagtcttaccaactgccgtctttctcattggctacgtggttgggcctctgctattcagtccattgagtgaaaccattggacggaaacccgttctcctctggtctttcactgtttttgtcctcgctacgcttggatgtgctttagcgccaaattggtcctctcttctcgtctttcgaactatctgtggtctggcaggggctgctcctcagacagttgttggtggtatttatgcggacttgtttttcgatctgcgaacccgtggtcgcgcgatggcgatgtatatgtcggtatgttatgatcaattacgttaacggtagaatatgtgaatagtactaatatgtattctaggcttgcagtttcggtcccattctgggcccgatcatctctggatgctcagtcaaatatggttggagatggccttttaggattgacctgattctgtcgggtattacctggctggctctgctcctcacgtctggtatgattatcacttggaccaacagtggcatcagctaatctcaaattaaaatagaaacttttggcccagcaatcttgaaccgacaatctgccaaattgagaaaacattcgggatccaatcgatacttttcgcgtcaagagctcaatctggactcgagattcactccgatggaaatcatcactcgtcccatcacgatgctcttttttgagcctatcatcacctcaacatccatctatatcgccctcgcatatagcctggtcttcttttactttcaggcctatcctatcatctttgaaggtactgctccatctggatttctcattgatctccaatactaacaattgatcgataggtgtctatgatttcaccgtcgagcaaacttccctcacatatatcccaagtatgtgaatttcttttcataatatccccagacatagctaaccatcacagttggcatcggcgccgcatcctccggcttcgtcgccctctactacgacatgatctacgagaaagccaaaaagctcaacaaagcctggacctccagcgaagagtaccaccgactccccatgtcctgtatcgccgggccctgtctaacaatcagcatgttctggctcgcctggacagcaaagcccaccatgcattgggtagcacccgtgatgtccgggttcgtcttcggattcggattccagacgatcttcatttcgcttcttacctacgtgaccgatgcatacaagatctactctgcgagtgcactggccgcttctgttattgtacggagcattgctggagcgcttttcccgctcgccgccgagccgctctataaatctttcggggtttcatgggctacttccctccttggctttattagtctggcctgcattccgattccttttgctttgatgcgattcggcccttggattcgtgagagaagtcccttctgccagaggctaatcttggaggagaaactcaaggccagtgggtcaaatacacctgtgcaagtatagagaaagaggcattattttcgggttttgcatttttggctttggattctggggaacctggtttattggccgggaaataagtacgaaataatgacttgatacctaatttaataaaagttatgatttacaactagaatacgacgccgaaaataaccgcttttgaggccagaaacggcggtctttccactcgtaaccctaaaacaccactattctgcagcccagcacttgaagtcatccacgagtcctactgcggccttacctattgggttagacaattgcctaaataggaagctactcaatcgcttggcgccaaggcagcacagcacctcaagacctacaagttgaagttgaagttgaatagtccagatcggtggatctatccacctccacttactgttcttggcgtataattagcgtggtatcttcacagattcaaaataatttaatatctaagcaacggcgctctcaagcctcaatccaatatatggtagggtccccgcgtatcactaacagcctagcatccatcgggcatattataaataaggtttatacaatatagaagggaagaattagaagaaatctacatgatacgaaatacaagcttaatactagggactaagactaattagggagatattaggcagatctctgcgcaactagaaaagagggtgaattgctgtagatcatcatcatcatcatcatcttcataatgtgaggagtatcaagtgtggagtccccagaagtcacgaactatggagacctggttgccaagtctatgaaaaatcggtgtgccgatcttgtgatttataggacttatggctgttttcttttgtttggtatgtcgtgcaagttatttacatgtgtgcagatccaccgtataagccattttggaagtttagttgtcaaaacaacccgccccgtgaccgcaatgtctcttcctcacgatacataaaacgctcgcctccgggagacctggtctccagcgtcatcctcctttttgattcaacttttcagtgtttcccacaatggacaccccagaaccttccgttctgctccttcccgacgatcccttcttccatgagctgttcaatcgccatacccaagacccagaagcatgtgttatatatgaccgagcctcggagcgctcggttaccccgtatcactttcttgtcgatattctccagactgtcgacagggttcgccgcattttgagccaaggcgaagaaacaccaagtgccaataacatcttcgtttgcgttctggtgccctacggctatgagtatgctgttactatactcgctctgcgagcacttggactcacagcagtaccggtgtgtaagtaccaaaccccaagtccctaaagttctctcagtacgacctgaagtaggctcttgcaagtctttatttccgaacctgacttgtggtgcgtggaacagcggaagccatcttacctgaggagttcgagtatttcgttcaagtctgcaacgcgacatatttaatcacaattccttcactacaggatcatgcagagtctcttctcagtggtactagcctcgccattctaaccctacagcttcccctctccatcacacagccactgccggtgcttcgaaaacctttacaagtatcagagacctggaatacagaccgtggagccattcttctcttcacttccggaacctcaggccctcctaaaggtgtacttcatacacatcgcagcgtctacatcggagccaaagaatggattgaaacctatggcctgacccgcgatgaccggatactgcttccctggaacagccactggtgcgcaggcttcatgatgctgtctggctgtattctcgctggtacctgtgcggagatctgtccaacagtcttcaatcccgcctggttctgggagagaatcaaggctgcagaggtcacattcctacatctaacacctagccttctcggtccggctattgagtggtacgcaagggaagtaatacgtcagtctccacaggaagtcgaagggtacttggtggggtcaaggcggctaaggactgtcgttattgggtcgacaacggtaccgacgccggttgcagatttttggattgagaaagaggtcaagttcgatctgcactatggttgtaccgagtgctggatgatcgctgcgacagactggagaaaatccgaaggtttcacacctgtgagtatcgtaagcctcttgcttttccttcttgttgaattaacgttgtgtgaaagcgtcatgttggaaagctagtgtctggtgtcgaaacaactctcgcaagtgagagtgaaggcgagatggcgataaagagtcaagggttatttcagaagtaagcagttttacttgccatcataacagtgtgaaacgaatattaacagcattggcatgcttaagatatctgtccgctaatcctcacatcatgaacaacgtattcgacgacaatggttattatctgaccggtgacttcatccgacgtggacacgatgccagtctcttcatcctcggccgtgcttctcaagatggtgagcaatactctcgactttcccgtccaaggtttcctacttttgactacggttcacatattctgttcgcaagctttgtccacactgctgatcatcctgttccatcgtcagtggtgcgcttctctggctggaaggtctttactttggacgttgaagacgcccttctaaatatccctcacatcgctgccgccgtagtccttggtgtcgacgatgacacggtgggccaacgggtctctgctcttattgtgacaaaacctcagcttgagcagtcattgccacagaaagtatcccttgccacactgcgaaggactcttgctctcgagcaacaattaccggtatacaagctgccaacgcttatgcgagtcttagccccaggggaggaaattccgcgaaccaacagcggcaaagtaagcaaagcatcagctcggaagaagttcttcgcgtcagatgatcttgattccgagaaagtggaagcgtgggatctgaataggaaagacgaagatctaccgacaagagcatgggattgggctggaattggagcacagtaattcagagatacacaagcgcaatcacacgatgccagacaaataaatgcaaatttccggaaagaagaaaggaaaaggtctgatactagaatacagacgaggtaatagacagatggattgccctataggctggttccactttacagttaggttcatgaaaaggacaatcggcatcttacgagagggcattgggtgctcgtggtattcatggcattcaattttccaatacttccgagcaggttatgacaacgcttacaaacttgtgccgttctattattgcggcaccctcaaaatgtacgaaatatatcttaataggtttacatcacccccatcatcgatcgaattacagatgcaaacaataaagtcccaaagtatgtctacatgagagttactgccgagaggcacgccatatagatctctttgcctattcaaaatgtttcctgatgcattttacctaactcaattcatggcgcggcaacaataacagacataagtcctaaattccccctctctagcctaggcatacgaccgtcaatatcatccgttgtgaaactatctatgccattccaagtcttggtttgtgttgatcgaaactcagcgagcatcttctcttcttctttgctggtcggttcctcgctgtcagttttgttcttgtatcggtcgaacgctttgacgcagaagtggaatgatttggagaattcggcttgcgtgagtttattcgtggtgtcggctgttccctggatgactagagttgaaagcagagattagagacgaagttttgtatgtgggaaggtgacaaaggggggaacaaagttagattctccatgtgagtccagtagatgggcaggacttactcggcttgaagaaattgaacgctcgatcgaaattgtcttcgccgtattcactcaagaccggttccttttggttacctatttgcttgtacgtactcaagacgacaagcagccagcgtgagtaacctgcttttaccttattgctgtgccattttgcggcaatttcctcttcgcagtcgcctcgaatagctgccgagactgtcactgcggcagaaagcgcgcttgttattgccagatggactccggaggagaaatatgggtcgataaagcatcccgcgtcgccgataatgcgtgcatatgggaatgcataggaagatgagctgtatgaaaaatctgacgccgatttgattcctgtgacaagttcgcctcccgataggaactcgttgagatgcggtgccagcttcagagacgataggtagaagtctctacttgacagaccagaggcagcttttttcttgttcatgatttcttggttcatgacaacgccgacggatgtggtattatcatggagagggatgaaccaagcccagccactctcatctgtaagttaccgtcataatcattaattgcatcggagaactattttctgcctcgtacacagttgtagagtagacataccgattagtgcctcaaagtaaggcgagtcctctcttgctgttccgattccatatttccccgtggatctccagtatccccaacttgcaacatttttgagaccttgattaaatgtgcgattcttcaagtatttggtacttagcaaccctttactgccgcttgcatcaataatgtaatcaaacttcacagcgccgctgacaccctcggatttgagtgtatacgacgcagagacaggacgaccgagagccgaggcaccgctttcgtttccggccgtgccattcgaagtaggcggttgtgcgaactcgattgagttgaccttgaccccgtcaaaagcctttgcacctgactttgccgcatgtcgaaatagtaactcatctgcttcggagcggatgacgttccacgtataatgatttggtccacctgaagcgatgaaatccgtatctgtcgacgagcgtcagaatttggagctaagcaccataattgatgttcgctcatagactcacatccctcataatttgcttggttcagtgtgaaagctgcaccgacctgtataagtcagcttgagaaggcaaccaagaccgtaccgataccaaccgccaacatcttcaagagcttgacgcaatattcacatgatactctggacgtggcgggatatggcagtgctggtactgggacttgccttcttcttaaatccatattgatcgaatgtggagtcgcaatcgataaagcttaagtagtaccgcattgaaggtaacatactctcgccgatatgatatctagtcagtccacgttaagaagtgttgctttcataagtttagtgaaacaagtcggagatttttgaagccaaaggtgacaccggaaaaatataacaggcagtatacagggttataaaggggaatctgtgaaaaatcggttgtcatacctaggatgtacatcggcctccaagaggacagtatcgatgccctctcgagctaaagctgcagcggcataagatcctcctggcccgccaccaacgataaggacagtgcaatgctcaggtattgacattgtaaagcgcaggaattgaagatagaatgtgtggtttgaggagagattgattttgcctcaattgacacggcagtactaggtacggagtacatatcggtaattccgctttaggatgatgacgagtaactaaatcactagttatattgtatgtacaccgacttttcagggacttatgcgggtttcagctgagttattgtccaccggatctcagagcgggtacggcatcgccgatatggacccgctttcgcgacaatagtagtaccaaccaccaagactgcagatacctaccatgtgtatgtaaatctctaacaaaattaagtcactttggtcatatcaactgcgtcatctatcaaggagttgaatcctttaggaatcaggtacgctaactaataggtcctactaatcacaaaaccaaggtcgcttaatccatgaaattcaaaaagtggagaaaaatagatcataactgatcttccaccctgtgcccaccttctgccgaatttagcagggactatacctactagtacgtcatgagtgtggaacatgttttgactacggagtacaaaacaatacaatgtttcctcagtcagcaccagaggctttcatatcacattctcactcttacttatggctgcactgggcatcaacaaaacgcagctaggagagcctttgccccccggagatatacatgtaaggctaaccatcagtccaacgcaactaggatattttctcactgatcaaagggcgtgagcgtgagccttccgctatgggaagatacggttggatggtcaagccgaaacccgcaagttctggcgctgctaaagacaggataccctcgattctttatccatcgtcttatcgacagactcgcggagaagattgttgagaggtttcacacgcacaatgaccacttactttctttgtcttcaggaagggaaacgttgctaggaatgctatttccttgcaagcgaagtgcagatcagtgtgcgcaatttctcagaaaaagtcttcccgagatccagacatgtcggttcacagttctctctttctgcaaagagtcaaattcaccgtctagacttcagacaaaattcggtgtagactggcaaaacttggaactgtatgctgtagtctatcccaattcggcatttagttttgccaagtcgttctggcagcacacgggcttcgggatatcaagtcgctatgcagtactgtgcctcgagaagcaagacctcttgagcttgaaaatcggtcgctgcgatgctgagagtgggtctcacgaattggcaaagggactgggccttccggcagccggggatatagattcgccaaaagcaaggcattggatgctgcacagatagcagagtagtaaaaaccctttatcgaagtttgaaatgaaataatacccaaaaaattgacattggcggaatgacgctattagttatacatcagtctaggaaaaagaattacgataatcacgatctctagcacctggacgaaactgtcgacctgagaagtgatatatataatttattcaacgccgataaatgagtgtatacggaaatttgtatggtgggaatagcttcattttctgaactgagcgctgtcatggtaattcgggtattttaatttctgccagtctattgttgtacttcaggcatttgacctatggccgctctgaaggcaaaaccaacccgatatggtaattcacagtttacatgtaagtacttctgtgcaatatttacaagggcacaagggaggcaatgctaaaagataaaaataaatacaaagccgagacctatcggagatagactgggagctaacttggaagatctccaacaacagcgtctggcgctggcgactttaaaatgatttcgcctctccaaaacaaaagtttgactagaaggtccatcccgaagtatctatatctcttctccaggaccaatcattgcaaggcttagctaggccatagatggccaatgtattgttgtctgctcgacccttgggcttgaagaattccgggtcttcaaatcctacgaaatgactgaatataagatgttaacaacctagtttggactccgcatcatcacctcgcaagatatcatgtaaaacctacattgtttccctttcctcgttccatatcaaatttgtaagccagctatcgactggtaactaggattccgatatccgcagctttactaatcatatatcagtatcattccaatcattccacaacaaacagcctttcaagttagataaagcttactcgtattcctctaggaagactttaaagatttttgcacgtttccggcggctactcccagtacatgctatccccattttcatctccaagggcaattccctcaactttttcaaagataatccatgtgataaagccacctcggacggaaccaagaggagtcctgagtcccttgctcccatgctaagagcttaggggtattaggcgaatttctttccttgagggcttggtatgcctctagctcgggcggcgtaaattgagtggcttcctggggtcagacagggcctatatcgcccttggcagagggaatctgcttcacgatacggaggaaggctgtgggtccattaggaaattgggcatcacgacagacgaatttagtggaggctagggaggggtgggaggggtaggagatagcatcttgccattgttcgacgtgctcgttaatcttttggacgacttcccagttagaaggggtaggctcgctcagagtcaagatcttgcattctgaatcctggataggatcaggaaaccatattttttgatcagccatgatgggtgtctgctagaacaaatttccatgtaggaactgacttatacatatatatggatgtgacgtagctctgatcctttctataagtaacgttgttcttgttccatgaaccttagaactttgctcatcgtgcggtgatttgaacactgtggcagcgtttcactaaacgtctgcccactaagtgcctgtccaaaggtgtcatcgtgcctgattactggtgaatatcccagaccccagtcgctttcaacatccactttccgaacgaaaacggtctcatcgtacgttgtcaagaacgcgtacttgaggtcccgctcgcgcatctggccggccaattgccctatacgttatataaatgttagccttggaacatatcgagtttgggggattatatgatcacacgaacctaggtaccgcccaagcttcttctcatttccttgttcgaatttgattatggccgcatccagcatattaactttcagacgatcccatggtgttttcgcctctccgacgaccttggtggctctggacgaatcaaggactacaaagtctggaacgcccgtgaagggagttggcctcgcagccttgtaatccgcgaatcgcagattatacccttgggtttggagaacagttgtcactgcctgtctatttctttcgtggaaccttctgcgcacaccaagatcgtccccaaccagaacctgctcggttgcgacagagaatgagccgcctatgacaatggcctcgattaccgccggatcccaagttccgttgtgagaatcgtacttggcgacgacatcttggtaagaactctgccattcgtgaagcgccaggtcgatcttggacaaggagtgcattcaatcaaataactaagatgaagaaagaaagaagaagcaagttgcaaagttgaagaggccagttgatatagctgaccactttgcaaatgttgtaaacaactaaccttcaacagtacacagcaaacgccgggatatggaagtagtgggttccccttgctttggccctttcgagggcagctttcaaggcaggtacagtcactctgctttcagtttaccctcacatgaacttcagattgcaaggttgggtgagaaggtgatgatgatagtgatgtcgacaaagcttcatttttacctgcctagacatgtgagttgaactttggtaatttgcttattcggtctctgttatggtacatcaggtattgaagagaggagaccctgcaacgggggcggcaggggcactgacagctctatttgcgaaacagggtgagagcatagtcgtcacttggagtagggtgccagagaggacctaagagaagatggttgaacgtgtcgttcgtttctatacgaatcacatgccgctgagtcatcctgcactacctaaaatcaggcggaattcaggcatcagccctaaaaaaccagacatagatccctgcccgccatggaccttcgcagccaatgccaaacaatcaaaagataaaaagcaaagatgaagccaaaccccatcggacttagatcaataactcgggcgctaactcgaaacctccccaaccagagcgtctagttgcctggcgtctttaaatcatttcgcctctccactttcaaaaggtccagaatcgcatcttggtttattgattttcttgattttcttggtcttcttcataatactcttgatttatttctcgtttctcgaaatgtactcgcatcttgaagctgaaggcacttcggtaactgtcgctcattgcaaggcgcaaaacttacgagttggttcgtgatcccctccccccccccacttccctcctatccgtgtttactcccgtatatgtatggactaacccgacaacgattaagtcgatcgtgttcttgagcctcaaaccgtcgcacatttccttcaatttgcgttcggtaatgagcccctaccaaatggtgttcaacccaacaccgagcgcttatctgctgaggaagcactcttcatcaaaccaaatcaaaacttccctccagactccgatggcgaacccctcatgaccactgtcatgtcccggattggttcccaccgagatcccagtcgtctgtgcatggtcgggaagaacttgcaattcctcaagtcccgtctatgggagggcgtcatccccctgagcgaccagctatggcaggagaagggcctcgaccgaccaaagcattttgatttcgcgtgtcagtatctaacggccgtgatcgccgtgttccagtatttgaatgaaccaacggtgcgattatatcttcgcgacacgttcaattacatccacgagcattgggcagcgctcgacactgtcctcaacagccgcagagcggagcaaggtaaaaatcgcgttagtgtcgccgatctctggacaatgtacatggcggctcatttcgagatgatgagcgagcgcgcccatagatgggttactgtgcatgtcaatacactacgagcgccattactgcgagctcttctagagcatcggccagtagatgggggagccaaccccctcggcgagcctgacgctatgcaatggaagcttagtgatgcgctgcacatgctagctgaaattaccgccaacgcggattacaccatcatgatccctatgaacggttataaggggtatggggcagctcccccgcgggacggtccgccagcacttcatgcggtgaacctacgggcgagaagtaaagcataccatgagcgtgccaggctgctcactcgggaagagctcgcccgtagtgcagctgcgttcatgggttcatctacagtcccttcggccgcagtatcataccatacgacatcccagtgccagattaaaggccagaatcggttgaggaaagagattcgtggtgcacctattgaacccattccacgcgagccttggattgctgcctgcgcttcgaggattgaatccggaaggagggagcgtaggtacgggttcgctgtgtatcggttgacttacgggcagacggagtctgaatgggcagaatttgtccgcaaagtggaagctcatgtttcggattggggcaaagggcaaacaggaagcggcgcgatcaagaaccatttgaggctgcactggctgaatgggaaagagtttggtattccagagggcgatatcgatgcatctagaaagtgagtatgccctttccctctcttttttcccctatcctacactacgaagctaacaagccaaccagacacttcgaaaccatcaaaaattccctcgacgactggtcaaagttacaagtcagggctttcctcgccgttgactccgcttgctttgcctcatacaccaccaattcgtacagtgccgttacatcccggctcattccaggtgactttgccggcttccttctcgccgtcgatccagaattcgactcgaagaatggtagtgaatcagccgacgagtctccaggctacgaaggccatatgcgcatcctcggaagccttgtgtggagtgatctctattccttgctattatcacagacggcagatctcgaagaatactggccattggcaagcgagcacccgaacatggtgtatgtcggcccgacaatcccatggcagcgatacatctggaagaaacacaacgatatgcgctggaatatccttcgagcggtggtagactatgtaaagcgtaacccgggagtgccaacaacgcaagcaccccgggcgcaaggtacgcttgcagcgatatcccagaccgcagctgcgtctacaactacgccaacaaaccctgctatacccacaccgacagcacacacagagcaggaccctaaccacggagccttccgcacattcatgctcctcgagttccaacgctacttacgccagcagggtcacccgcggcgggcggccatggtcgatgaattgctccgtattcagcctaatgaggagccggatgtaggacggctgagacagttggtgaatgatgaaaatgaacgacaggagcagcggagacgagatggtttgggtgaggatgaggaggcttcgggggagtaccggccggactgcccattgcagtgattagggctaaatttatttcttattagttgcgaatagttctcatcatggattgaaagggtttatctcgctggctggtctagggagaaaaccatgcatacaaaggtcaagggtgacatattgaaaaacgaaattgaaattgtttaaaacatgaagcatagccacccgcgctgacatcaaaccgcaggaagatacactaaccccgaggcttgaagcccacaccccagcgccaagcttagtcatagtcccgacgagttcgcttgcgaggacgctcatccgggtccacagccttgtgccaaccaacctggcacatatcctccgtcaagtcccttccacagcaaggatgaaagaacattttcggccaagcttcgcgatattcctcagtgtcatatccatcatatccaagtccataggcaatttcgtccttgtcgcacatttcctcgtcgatgatgtcgagctctgttcatacattagttacatttcccacttgagcgcatgtgtgctaggagaatacacgtaccaacgtgatatctacagcttgtctctgagtttcgggtgacgtcgaacttttccatgcagtagatgcagtttgcaaagcgggatgtcattgggacgctgacttcttgctcagaagtaacgcgcgccgaagtgacggcgacctcagaagtgacgcgggcggcggaagagacagggagaacgggctcggttttcacatcagcctttggtgctagtagccattccgaagcaatcttgcggccttcagggctgttcttgatgatgtccttcaggataccctccagcaggaatttagattgtttctgcatttctactaggaggagtgacaggttctctggttgctcgtcaggtgaaggcatagtgacggttgaatgaagtgcaagtaacgtagggagtaaagaaaggtgaagatctgttcagagactttgtgtctttttgtgggctgcaacgcgcgcgtcctttggttatagaacaaacacgactaatcaaaggggcgcaccgcagcgaacgcagcatctcatgacaaaggcatatatgcgggaatgaactattgtatgtgcttcggtcgcactacatcgtcatttcaagagagagaaagactctgtgccaggctattccaatccgagaagtcgacaaagttaggatcccaaatatcaatatcgaagcctccgtcaagcctcgaatccctaatcccaggtccagtcccatcagcacagacaggacaattcccatggacaattggatgactctgctcatgcgcctggcgaatacgccttgccttattccgcagctgcacaatcatcggccatttaggacccgggtccggccatgagggatcatccgtcaaatcgaactgcatatcgatagcgcgccaagctcgttcgacatgcggaccagtggggtaaacacacagagtccagagaatgaacgtgaaaaggtggtactgggtgaaaatcatcatcatccagcggaagccacgcagtaatgcgttgctgttcatctcaaggccaatttccatgccatagcaggcttttgccagcgtatcttggacgaggttgtggtcgagtgaacaagccgccggtccctgtgactgcagctgtttctgtcgaatgcacacttcgatctttgtgaggagcagccggccgaggaggaagccgaagcgctggattgggatgtttgggtcgctgtggcgcaggtatttctcctctattgcgcctttaaactctgcaatgagtagctcgggatcagatgctcctactatgcttcggaccaacgccggccgtctgctgttgatttctaggacgattagagagaatgtcaactcggtccatcggttctctgatacggctgggacgatgttcgtctctgataaactctggtcgtcgacgttcaaaggaagttcggtgtcgccgtagttgctttctgggacggtgagcccgtggtcctctgccactcggctgtcggctgatttgatatgtccccatgttcgtcggcgtagctcgcattccaactgtgggagtctgaaatgtttcccatcccgatggagaccgattgattgtgcggctcggatagttactccgtgtaatatccagccagaccggccactattactaaatctaaagcatgcctagagggcaaagagatgtcagcgatgacaattacaaaaacattgatcaaagacacatgaagcaacattctctcacctgatatatcaccatcgcttgcaacgaggtaagggttggagaatccaaaaactcagcgtgatacaaagataattccatcccatgttgataccgccgcaaattagcatgcaagacctcattacgagcatcatctgaaagcaagcttgtcgtagcggcaaaacaaatagcaaaaagcaaagcacgtacatcagcacgcacactctcaggctggttaatcgccgcaaagatacgcgattgtgccgtcggaacatgaagaaccttcaccaagggctctacacgggcgataaatgtctgccagagcagaaccgcctcccaacgactgggaaatagctcttgggtgttaatctgcgccgagagcgggttcgtgaaaatgccatctgctctcaacatcggcagtctatgcggactagttacagcgacgggtgattcaattgcagatttcagctcctgctctttttccagcacccgcgagagaaacggctcgttgatatatcggccgtctttgcctaggaacccctggtgggcggggcattctgtcgcagcggggttgctcgatgagggtctgcagtcggatcggctattcggcgtcggtgggattgtactcgggcctgggctttgaccgttggtagtcggtcgttcgtcgatcatggatgcgatgaactgttcaagctgttctaaccgtactgcaacatcggttgtgcttttcttcggggcttggcgcttcactcggcttggtcctggatactggcaggttacattctggcgcttgcatttgctgcatggtgagcccttgtcgcatttgatcttgtgctcgtggcagcgtacacaggatcgctctacgttgtactggcgtgggtggtccatggtgctgtttcacaagctagcgaaatttgaggtcttggtactaggttaaggagaatttctttatcagatcctggcttctgcaatacattgactatcgagcgtcgaactggtgatgtaagttcggtgttcggtcgttcgtgaattaccgacgtccgaaaatgtgggggcgaaagccgcttggctcatgccctatttcccgtacatcagatgattataatgcgaatggacggcctccagatattgtgatggtcaattttattcatcctttgttcaaatattgacctccaggtggaatatcccgccttcaaaggtcggccaagtaacagaacacacgcatcaatacgtgtagacgttcatttgccaagtacaatcccgaagccagatgctaaatacaaagaacgctaataagaaggcttctgggttggtcccagaatccagagccgccaattcccccatgaaacagatattatgaaataagaagatcgcggacactcatgccctttctccttggaatatcagcaggcgcagctggggtctcctccacagacagcgccaatgccgtactcccagggaaattctcactgatcgaatcagcagtccctctccgatcctgagtcagcatgagcaaagctgccgaagcctcatgatcaaccccctgaaactcctgcatcttctcgttcgacgcccatatcgggcccagtgccgggctaggaaggatagatgacgcatcctgcgggatattggctgaggggacttgggtgcgcggagagaaggacggggatgtatcggggaattctgtgggagcagcgcgcaactccggtgatgcagaggtggagtatgaataagcagaagaactatcccttcgcataggcggctcgcctgtttctgcgatgaactcaggggatgttggagaggggggtgcggccggggtatgtgtgaatcctccagtcttcatgtcgcggatacatttctctaggtaattgacatagtcaatgcttgccttgttgggagagttagcatgttgtcaaatttcggaagaaatgtggctgtacctgaagaatggccagcttatgcatttcctgcccggtgcatgctgggatcatgtctttcaacgtcccgaactcctcgttcatcttggaccgtcgtcgccgctcaattagactatgtgcggtcttgcgggcgatcttgcggcctgcagcactagtcgcactgggctgtttccttttagagttcgatgtggggggcattgcgtcttctgaactctgtgaacccttgacattttccctcgtcctggtttttgaaggtgactttggcttcatctggatgatcttgcgagttctggttggtggcggaggcaaatcaaaatcctcgagcgggcgtttgatcgatgtacccgaccgtgcagtgtgacttgaacgacggccagagagttctggggaggttggcgatgccggggcatatgaaggatctgagcgagaagacttccgactggcgttactcaatgcagcaggaggtaatgtgaatgcatccccgtcgggcttatctttgatgatgaagccgcccgacatggctggagttggaagtcgtgacattgtaaaatggagggggggagaaatatgtaaataggtgcagagttgtacagcaaggggtccagactatataaccgtgaacgtcctcgcaggccaggttatagatagtgtcgcgtgcttccaaaggttacgcccacgagctagaaccggcgatgctgattggtggagcggagactcgtgcctcagggagcaacggacatttgctggagtcaactgtggggccatcccgagcttattggtaggtacctggtacttacattagcgtggtggaaaggggctgccccgtggtacctggtacccattacatcaattgaggtagcgcagcacgtgcatcgattggaggacagtctgcgctcgacgattacacggacgcactttatgtctcgtttttggcgacggcaacatttatattcccattggctggcgatggcctgtgtcggtctccatccacggttacatctgaagacttttccgttttgcgtgagacgccctcttctccctagagtacccgcttcctctcgagtcatccacacatggcacgtgcattctctttggagtcgaattgtggatgccggacaagctagctcagggacgatctgtttcggagttcgaattgggaagataacgtgcaataaagcattcatatcacatgatcccatgaccctcatccccttatccaatctatttacagtctcgttctcgtttcaagtaagaggaatagaacgaaagaacaccggttttgaatagggggtggagttcgagatcgctatggggcagttttctcagtccaaaaagtcaaaagcatattccaatctctatagaaatcaacagctatatacgtctatatccaccagatgagttccacttttccaccaaacggacattagttgaagagcctctcaaggatgatattaccaaagtcctcctccccaggagactcatccatccgccagatgcgattaccagcacggccactcagccagagaccatggtcacttgagctctcctcctcgccttcaatgcggtgacggttgcggcgatcggtaacgcacataccgcgagtccactggcccaatgtgtcgactcggatgtcctcaggcgagtttgccgagtgaacccacttcgggtcgtcggatgtcaacgcataccagacgcatacagggtcgtgcagactcagcatggcatcgtcaccaacatgtccagggtgcaggcgctccaaggttctgaaggtgtgccccatgaaggcatcgacccactcagccagcggggagccggcagctagaagaggcgtaatggcctttcggaactgtccgcgtgatagattgtgacgcagggtgatgtcaagtgggaaaagacgcagagtcagttgccggctaagacttttaggatacggtgggagactcccgctcttggtgggtggaactgtcgtgtggggattgggcgaggtgagtgcgaagatacgcgcggctgccactgcatctgcgtaagcgttgaactcgcccattggtgtcaccttttaatatcagccaacgtttctcaatatttcttaaatctggaaaaggcttgacttacatttcctggctcattgatggcaccacccatgacgaccacctctttcacgcggagaaatgcctcggggtcttctgctgcagccaaggccagattagtgagcgggcccactgctaccagagtcactgaatcgggctcattatcacggagcacacggagaattcccttgtatgctggaagcttggacggggtgaatgcgtggtcgtcacttgagcagtcctcgacaggcttaattccctcatccaaagttttagcgaagaggtgctcccatgccttagtagcggtgagatgcgggtgcttttagaaatcagcatggtctacttgtttttaagccatagcaaaggcccggctttgtatgagcttcacataccgttgcgtgaatgcccccaagtccatcggttccgtctgcggggatgtcagtaaacggtagctgaaatggtagagtagaactcacggaaatagtcggcaagcattttttggtcttcaagggggtcctttgcaccgacagccaatataggacggcaagctctcaagctgccgaagccttctggtcggccattctcgcggcgccactgcatctcccgctcgaggatgtggaacattgacactgcatttcggagacagctggatatcacgtcagaaaatgtatctgcttttcaacccgaaatgattccttacttctccacctcgatgttaccgaatgtcaatgagatgaggagaacctctacctcctccgcggtggcggacagagctagcaaaagggcgaggacatcatcaatgccctgtgctatggttaattctgaaattattgaaatggaatctcaggagcataccggatccgtgtcaatgataatcttctttcccatggtgaatgttgttgaccttcaaatgttggaagatgacggaagtgggagcttatcgttatcagttgttatcgggctgcggggtttcgtctggctatgaacccctcgtatgcaaatcatatactgcacactttcaagtgtatattagagacaccactgttagaatgatatcaagtgattgatcatggtatatattcccaacgaagaaaaatctactagtccaggcttaggactgcaatcccggtgaccgacggtccgcgggcggccaatccccgttatccacccgagcctcatgccccaccagatggcggcaacattctcggtgacaacatagttcctgctcgtcaaaatttctacgtggaacactttttgacggcacttttggagggattaaagtgatcaggagcttgtgattgttactagaacatgtgtcttgagccaatcatccataaccaatgtcgcagaataggtaagaaccaagccgtagcagcatttgcatctcaccctcaaacacgtggatccaacctcggtacctgcaatttctagcgcttctgatagcttgacagcgtggcggatgtcctcttgcctgtgaactagtggaggagcagaaaagcgcctgcatttaggttggaagctattcagacagagaacttgtatcttaaacttcctagctagaacacaaaaattgagggaatgacgtccgggtcttagcttatttgtccgtagactgggtgactaccgacgcgttcatactacgtgcacctacccatcttcggctacggagatttacacccctcatgtattccgtgggacttttcaaatggcaatgagagccacgacttcaggatcgtccacgagaaagcccggtttgatgtttgatgcagacctacatggacctcataacaaatatcgtaatgttatggtccctgtggtaggtgaagcagcatgtgctacgggtccctctgcctgcgctgtctcatggggctacggtgaaatggaggtcagagggatggggaggagagaaggagaaaagaagaaaaattggggaggaggggcgcttttatacccccaacccacgtgccttcctaaagtgcgacaggtccctcgcaccttccctgtgttctggcccgggaaatgagaacacaatcaaaggctcagcactggatagatagtacgtgagattataaagcgtcgcgtcgtttctatgtacagttggtaaaatatttaatgccttttcttgctgcagattgtacaaggtcatcacctcttagcctctaagcttcggcgcctagactaggcacaatttccgacacagtctgcacgtccttgtccccccttccactgaggcaagcaacaacatccttccccggtcatgtacagccccggcaatagcatgagcgctttctcatgcaggaacaataccttccatgcgacctagcaacgaaaaagcctccagtacattggtattattggccgaaacaaacgacattcgtccactttccttccaactggccagctccgggccaacgccagggtaatccagccccacagagatgaattgtgtgtttgaaatctgactactttcgtctttgtggtatataagtgctcacgctgtgaagaacaccaactgagccgcgacctagagttacagaatgttgtccggctagaggcccgcaatcaccagcttcaacaccaacgattgtaaccgatgcatcttataggaaatggtgggacatgcctgccgcgattgaaccgccacccacacaggtgactatggcagtatggagtcgacttccattcattgcgagagcgagtctccgtaccaataccattttgaaacgtccgggttcgggagttgatctggtggatatcacaatagttgaaaatcgaagacttggagacatatttcaataatatactccgtacatagggcttattagtcgcttattttagttcctagtcatgcaattgaaggctgagggcccaaaatggagttgatacttcccaggaagttctgaaaccatgcggcgactaatgctcatcatatcacttctcttctcatacgtagtcatctacgtaagaggagagaagggatcaactaaaggtgatgataaactgtgtccgacggatggaagataatgatctagctactaccatgaagctctctaaatatcttcatacaaacaaagccacaaagatctcatcctccagaatctagaagacacatctctgcaggccagataaagagactgccaagacggcaagttgccttacagctgctacggctgcctgtgagaagagagaaagagagaaatagatgccaaaggagaggtctacaagctgcatagggaaatagtgaaagcccctaaaagcatcaaaatctagaacagaggtagaatgaatactgtcagagaagtaaatgttcgacccctacttctcatagaacaaagaccaagtcgtacagcagaccaccaatcaaggcaccgctaattgatcccagataagaccagcagaggcaagtgacattccgaaacaagtcactgtcgtagcctagtgccaataaggcaagccgggtcccgaggtctcggcttggattgaacacagctccagtttgggaggcgaaggcagcgtgaaggcacacgaccacaaggccaaaaatgattgatctcataccggtgctaggactcttgtcgtcaacggctagaaccatgacagccaggaaaagagctcccatgaactcggttataaacacggtcgcaggcccgatccccactgcatattgaacggccacgaaactggacactatcagattttccgagctcgtagtgaggtaacgctcgatggattggtagcagaggctatacgcagcaatggcagctaagaaagcccctagaaactgagcgcccaagtatctggggacttttcgtttagggaagccgcggtagaaccaaagcacaatagtgatagatgagttgaggtgggcgcgagatatattgccagacaaataagtagcgatcatggtcgcagacccccagatccaactagtgtcggggtgggacttgttggtgacagcggcgatatttgcacaaaagccaattgcgagctgaatgaagacagctgccgcctcgacaacatattccaaaaggattccatggatcacggagcgtgtcctgttgctgatgtggaggtttacaggcatgctcaccgtagcgcctaaccgtctgtctgagtgaacatttagatcttcaggcgcttgttcatgaagctcgccctgtcgtgggcgtttagatttcaccccatccaaaatgagcaaggggcctggagcggtgcccagaacagatgccggactaactggcgcggtgctggaaatcagaagaacgctcttcggtagtactgaattgatggttttattattgccaaatgaggagctcattcttgagctgtggtcgttgttgcaagttgtttttcgagagatgctaggaatgctgatttatgacttcgccatctgtcagctatgctttcctccctgcttcatgttgaacttgacttaccctaaattctggccgtcttgcctggctccgctcatttgttttgtgataacgtgttcgtaagacaaaaacaaagagaaagaaaaaaaaatcgaacccaagctcaaaataattagcaaagaaagtagactcaaaatgtcaaattgcaaggaaacttgtgttcaattctttcggccgaccaatcgaggccaattattcctgcctggccccttgatcaggcctcatcgcctttgacatatagtttccatactatatttggacgtccatggacttttaactactagtaaatatttatcatttgatacttgctgagcccccagagacatcttgattccctcttagaatagccgtgttgtttattgtgaaatataaagccagacagcgaactgtgtgtataccacatttggtcactcaagaatcactgccgatatacggcagatccttgaaaatctcggccgagataatggagacgttttgatcttcgaaaaaaaaacatggcttgtaaaaagatccttatatggaggattagtcgagtttgcataaggttgtataaatcctgggtatagggagggatatatagatggatgggtcagacattggcaccgtagagctgccaagatcataccttgtgaatgaaaagagtgttggacttgtacttaacgcagtatattgggattcgaacctgactattataccctcatttttgctgcctctcatgccgcttctcagcctctgaatcctgatttcgcttggcaagggaacgacattggtgtattttgacaccaaaaggctagcttgcatgatacatgcacatatgtttccttttttcgagtgaaatttgccttacccggccctaagtgcatgcttgagtggcttagctaccagaaaccctgcgaatggtcttaagcccacatgtcatagcctccgcatgatcagcagtcgcagctccaggtgtcgggtgtaaataaagatgtgtcataagccacaccataaattgggtggcgttcctttcgaaaaactttgactactccgtacatgtctcgtgtcgtgacctttttcttgtcgttcgattcgttatgctttccagggacactttacagagtccacaaagctgggatcaagctaatgggaacaacctaagcacaatccggacgaaggcacgagtaagtaaacaaaatcacgctctagacgccgccacgtttcttggcaaacctatcaatcagaatgggcgatattccacctcgtatccccgacacacacacatcttagcgcgaagtgaattcggcgatcgagaacctctaggctactctcgggcaccatcaatgccactacagaacccggctaacatataacaggacgataaatcaaggtaagcctgagtatggcctgaggtgtttacaaaccgccgtacctatatatcgcagatattagcgtccatagcatgccccagcccctttttcacttccccgccggtcatctctctcgtgtttgcatctcagttctttcgtcttcgctgtctcacaatgtcacttcccgttgtctccgtcgcgggaaacgggctgttgtccaaaggcaaacgattccaaatcaaaggtaacttcattaaaaagaatgtgtaattcatgctaacatttccaaactaggtgtcgtttatggccgaagatcctctcgctcgactccgatcgacgttttggccggttcaagagccagtcagtgcgcaatcgatggccctatgataaaggcactaggggcgaatactatcagcgtgggctacatagatgcgacccaaagccacgataaatgcatgcaggttttcgaggacaatggcatatacgttcttgccaacatggcgagtcaaagggattggagccttatgaaatatgacaggaatggatgtcagctcgaacatagtgagtattttcggtcactatatgctcgctacatatgggtactaagattcccaactgcaggccaactccacatggcaaatgaacgttttcaaacaatacgcggctgttctggattcaatggccggatacaacaacctcttggggcttcttgttggagatgaaattattagtggtatgcagcctccaccgctcacggcctcaacaagatttaaatgcataaaataggctatacatcggtcgatctagccccgtatctaaaggctgcagctcgagatatgaaagcttatactgctgctaggcagtatcgtcctataccgattggatacgccacaagcgcagagtatacctatatgcaagcgctaggagaataccttgtgtgtggcggtaacagcgacaatgctgtagatttctattcggtcaatgactaccagtggtgtggcaattcgtccataaaagagtccggctacgacaccttgacatcgaaagtcgaaggcctatcggtacccacattcttttctgaagatggttgcgacgaagtatctccgcggctctttggggaccagcccgcgatttttgggtctaacatgtcaagtatttggagtggtgcaatcatcgatgagtggaggcaggagtaagttgcaacccttgatactcatttgacatgtactaacatcacacaggacgggaaactacgggcttgtctcatataccacttcaggagtcagcacgccaacaactctggccgactacaatgctctgaaaagccagtggtcttctatcagtacaaatactgaacctccgtctacgttatctaccccttcctgtcccgcatcgatcaattcatattggccgatagaccccagcgctgcattgccaacaatagcgggtcttgactttgcgaccatcaaagccgcgggtgctaccgatactacggatagtaccaggacgagtatcagtacgagcaccagtaccagtagcagccatagcacggaatccagcctttcaagtggtgcaaaggccgggattggtattggtgttgcgttgggcgtggtgctctccatcagcttcctcttcctgcttttctggcaccgacgaaagattcgccaaggaagcaaattacctttgatgacacagacccccgaacttgctgcgggaagtttgaatcgtattgctcccccagccgaactagctcacactactccgctgggcgaattagcccaaacaaattcattaaatgaactaccgggttcatctccgagggcccaagagcttgacactggggtggttcacaaggctgacaagcctaaaccaatcataaagtgaattacaacatctggatggtcctaagtattagctatatcgatgcaacctctcaatatcggacaatttatatgctaggagtaggtctattcttgtatgtctaactatgacgccaattgcagaaaatttcggcctctcattcttatgcttttactttctcccttagatgcagtcgacgtttccatttcatgcggctctttctcatcgcccgctgagtcctctctagagggtaattgactggggactcgccgccagtgaaaaccatgaagtcatataagaagccaccagcgaaggcaccacttatggtacccacccacggtccataaaaccaatacggattcaaaaagaggtctctgccgtagccaagtgccagaagggcaaggcgtgggccaaagtcacgagttgggttgaatgcagcgccagtctggtaagcgaaactaatcattaagcaggtgatgacaagcccgataatgagagagttcattccagcaccgggaggggcgttctggtcgtcaccaagagcaagaatagtggtggttaacacgatggttcctaagaactcgttgaaaaaggccgtggcaggcccaatccaggcttcacgctgattggtcacaaagctgttgataattccggtatccgtatttgtgtcgatactgaggtggtgctgaattgactggtaatagagcccgtacgcggtgagtgcagcgcaaaaggccccgacgaactgtgctatacaatactctggcatcttccgtttcgggaagccacgatagaaccacaacatgatagtgatagacgggttgaggtgcgcaccagaaacacctccggagatgtagattcccgacatagtggcaaagccccaggcccaagcggtggtattcgggtttcctgcatcagcaaccgtgacagccaggtcagcgcagaagccaatgaagagctgtataaagacccctagagcttcggctagagcttcgcgatggtgagtcctgatcacagaccaggtagtgtggttgttatgtacctcttcctcaatcaacccttgtacaaggggatgtagatcatcaggtaaagcctcgtgatcaaattcaaggctacctattgtaaaattatcctcgcgcaagtcctgtggaggctcttcgctcggaagctgatgctgatcctccccttcctcgacagaggacagcttggttgcattaggcgaaagccactcggagggttgtctcccgcgcattgacgaagtacgagatacccggctgaatccagcaccgccgcttaggattttgttcataatgttgctctcacgttgcaggcgagcatcctcaacttgggccgaaatctcccgtggatcagcggacttctggatctggcccctctcgatatcattggggtcaatgtcaaggccgagcttctgtgaattctccgctggaagctgagcagaggcatggttttccaacagctccgctttggttggtaccatgcccggccgtaccactcgaggcaacggtttagccaaactccatactggcttggcgttggcaggttgctcgtaggaagggttcaggtcgatgtaacctggttggacgaacggttcatgggaaagtcgcaactgagtcgtctcgtcagggccagcgacaatgaactccccctgagtcctctctgcgagcgtggtccgcggtacgagactgggtaacacgctccgcctagaggtcactgagctacgccgtcggacatcagtgccgttactagttgcatcgaaggagacccttgtgggtgagacgaatgattcgtccgctcgggaacgggtgcttctcgccggcgaggtaggtgtgtctacagactcggactatggatggaaccaatggtcagtcacctcttgcctcatttgtgtttatctatcgttccttcctcactcgcgttctttctttctctgggttctttttggaattaccttcgtccttgcaagtttgtttccttcggcatctcttctttccatattccagtcgatgattcgaggtaatttcttaagtgttaattgaaaaaaaaaaacaaacaatcgaaaagagaccagagaaataaagggtggagaagtatccgtataggctaggttatcaaattattagggcttctatttaccacacattgttactactgtttcaatacacaaatttcaaatgaacacttcgtttaaaggggggccaaactgaacaaatagatcgtgtcatcggacgccagcaccgatccgcaatgatgcgtttgtcggccgaatgaattcttcgagttattttgggctattacggagtacaggccatatacgaaagcctagacttgattccgtatatcaacgaagcatctcatcatttgaatcgtccgatgtcatggaaaattatcctcgcaacgaagattcatgtaacaagcatcattgctatatgtgctttatccgccatgcggtccagtctggaagtcgttggccttcaacgattctcttcctcggggctgcttttgagattcccctcattcttacaacatgccgcaagctcttagtgctacggcgattcctcgctataactaccaccgtacaccctcttaggatccaatttgatcattgttaacttgattaacttgatgacctctttacgaactaaatgtttcacttctatgcaagcattgcttttgtttgaatccttatggcctcgtgatggcctagatccctctgaatatcttttttttatggtctctaaacgacccaggtgatatttcctgcctctttctccgatattcaaaatcgggacctcacttcctcgaataccgcgctcagaacttgtgtgtatcggcactaaaaactgaacaatacctgcttattgtagtcaggcaataaagcttgttcggctaacataaaagcttaatcttgatatagtgtcactacttttcccctcatgcggggtgcggagaatgcttgtcaaaggaaagtcacgcatcggcgagtcttaaacttacacgaagaatatagtagtaaaaaggtttacgttagaggctggcccaatggaatttgtcagcattcggtagcaaaacttgaagcctagtttggagaaatcagtcaaggcagacctcgagatatgtcggccgagatatttgatgtgcctgcgagtggtacgaaaaaccagaatacatgctccaaatcaaacctgctaggagagtgtaaatcaataagtatttgatagttgatagttgatagtcgtctattcgtagaccaccggcaaggatagatagatcatagccttaatcccaaatcaatttcaaagccggtgcttgaactataccccaagtagcaaggacttggttagtgaagaccctttgggtttataaagaatggacgatacaagatttagaataccggggcataatctgagtaggatcaacgccatagatttgctcggtctctgtattcgacggggcatatcaaaggtttaaatattcaatatattggcctgattataagtagcccgcaatatctccctcccacttggagcttcctagcgattgagccttcacgaagaatctcatatttcttgtcaccctcgccatttcccatacctcaaacagttatccctctgtactcatctccattgcttgtcaccgcgatgtcagatatgacgggatcagcaacccagccaaaaggctattggctgtcctcccggcctcggcatcctcacgatgtctagccgtgctgtccagcaagtgcatttgcgcaagattccaccaggttcatattacgcctcgatcgcgaaacggtaccctgtcatgcaaaaatatgagaacaacgaacctgcctactttaccacaccaccaactcaactcatccgcgctctacacgctactctaagccagatcacagctcgacctattgctgagcgcattgccattcacggcaggcttctgacaagattaaggctgctgtcactcggcctggtctgaaacaggttgctacccgccccgagtgccaggctcacgggctgactgcaatgtacgtacctcctggtttgaccccgcctgacgtgctccctggcatccttaggcgcggggtggtatttgcggctggcttgcataagtaaatagccaatcaggataatcgatttggtcatatgggtgtcagtgttttggatacagatcgcggcgatattgagaagggtttggtagctctgacgctttgactgaggcgagacagatcaaagggatgtagggatgaaaaggtggctgtgtactggcacagtcaaggtctcagtagtagttactatccatccatcgtctgtaactcgcttactgggatcgaggaaactaccacaaacctcgacgaggcggtaacagaagcctttgtaattcctagctccaaatcgtgattctatgcatactcaagtcgatgacctacagcgctctccgttcatttctcatgcagtccgattattgtccgtcacggcggcaacggcatctatctgtttgctgagggtaaataaccctgaagaccaacggggctgtatttctcccacatcacctggcggtcacttccgcgtgctacattagttacttagtgttttgaatgatagaaccttctccctctgcgacgataaaggtttcgacctccttttttttagtttgctgagaggttgtttgtgactcgacgccttagggcgggccggccccgccgcctgggcgcgtcgcggagtctttgtcgcgtcggtgagccaaccacttacaacatacccacaccgcaaacgcccctggccagatattactgaaacctcggtgaccgctcatatcatgggcttagtgggagacttcaggaggatcaaaggacacagaagagtaagaaactaatctgatatgtcgaagacttactccgtacatattgatgaccggcgaaccaatcccacgcctccttttcaaagtgctgcatactgcaggtcttagactcgttagccaatgccaatgcatgacttgaccaccaattggaccgggtggtccgttatgtccggtgcataactcctttccgcctcgtggtagggctcctgtaaggggtaaaagaacatttgagagatcccctgccggattgatgaatccaatattcaaataaataaatgctccacgctaggaagatataaatcagagcgtcgaaagcggagaataaagagacaggcggagacgtggcctgttcactctcggtgtcttcatatattggagcttattagtatgttccccaggtacggagtacgttgaatacaacgattgaaacatatgcagtcaatgctcaaatcagcgtacggtataagcatcacattgaaatgtttattcgccaagttcctagacaagtagaaaatcgaggagacttgaacagttagaccaaagatcaagatgctctagaaagacgccttggaggtatataataaatgcagtgaagtccaaagccaagggctcggtaatttaccattaccgtcacagtaccgtggtggatctgccacggttgccctttcctctactcctctgctcttcgcctttccacctttcctcccttctccatcttctactctctttaacttgccttgtttatcctgcgcaccgactgttcctattcctcccattcacgaattcatccccccagcgcattcccccaggcgctctcacggtcaattgaccgactggaatctcctcttgaggaccttcctactggatacatcaagcttctgtagctgagtacaattggctcggctttcggtgcgcaactcaatttcgaagtgcgcgtgcgcaattgtcctaccctctcatcccccgcaactttcttcatccgtcatctttcgatcaacacccatcctccgcctatctcggttttaatccaacagtaagttccatgcaaccatcatggcagcgttgatggtactgacttacgagtgcacagctccatgactatgaacccctatattagctgggcgatcttgctcgtcgtggcaggtagcctgggctggtactacaccaatggcacaacccccaaggccaacgtgattcgagctgccgtcgagaagaccgaggccactgtagcgcccaagaagtcaaagcgcaagtctaagcctgctcccgagccggctgccgccaaaaagtctgaggtgaagaccgtcatgtcgtcccccaccaccgaggatgacaaaccggacgaggaaatcgaccgcaaggagatggcccgtcgcatggctggcctgaagaccaacgctcctgctcagcccgctcccgccaagcccgctcccacaaagagtcagaagaagaacaagaagaaggctgcacacgccagcgacacccgtgcctcctcgaccactggcgctgaggctgacgacgatctatcttccgccgggtcgccccaggtgaacgccactgttccctcggccggatatgtttccgacatgctggaggcccccgcccccggtgcatctgtgctccgcgttactggcaatgtggagaaccagcctaagaagcagaaggttcagaccttcaaggaggtggagaccaagaagcagcgccagcagcgtctcaagaacgaggcccgcaagcaacaagttttggaggctgaagctgaacgcaagaagctgcttgagaagcagttgcacactgctcgcgagtcggagcgccgcgaggctgcccgatcatctacacccgctgccaacgcctggcagacccaggaaaacattgctccagtgaagaccaacggggtcaatggcggatcccgccccgctcccgccgctcctgccacttccgtctctcagggccttctggatacttttgagtcccctgctgctcctactaagtgggcacagaaccttccctctgaggaggagcagctgcgcctcttgggagctgccaaaggtgatgacgaatggaccactgtctctaagaagcagcccaagaagaagggcgccaagtccgacgagagtgtcagcgagaccagtgcctcggagaaccactccacccttgttgcccctgcccctattgagccgcgcgtgacggtgaccccaacctacctccccgacatcttgcgctcgcgcgagaagggccacccgctggactctgactgggctgcgtgagctgtttccttcatgaagtatttctctccgttctctcttcatcttgagctgtatttattacccttacttcgtctttgttttctcttttttggcgttctgggggtgtcacatcattcaagcaccctccctcccctcaacaatggggcctgggaggttgcgcaacgcattaggagcggaattggtagattcccttgcaagttgtgcaagaggaagaactgcactgcggcaacaaaagcagaattgcgggaatggatctgacgctgtgtttgtgcaagttcttttttttctttgttagtctagctggcaaaaatctgtattgcaatgaaatcataaccaatgcttgatctaaaacaaaataaggcgcaagaatgtagagcttcctccgatattcactatagagtccctgtgtcgtcactattcccaaaacggtttagcggccagttccggttatcgtggcctgaaggtgctttgtatacaactccttggtatttgctcctgtcttgaacttcttcttccccaacctgtgaggactcaactccaatttcttcttcttctcaatctctttttgtattattcttccgccatggcccaaattcgtggcactgcgggctataatctcggccaccagaacccgtttggcgggcccggcagcgcagatgccgccagcgatcctagtccactggacgcaatccgcgagcagacaagcaagatcgaggactggttggataccttggccgatccagtgaagccgtatgtttcaatcctactctttgttttggtcctatttctctacccgcgtcgtggttcaagtcgcgaaagagctcaaaacaagggattcaaggcatgcactgacaccctgttctttcgctctctagctaccttcccgctatcggccgattcctcatcgtagtgaccttcatcgaagactcgctgcgcatcctcacacaatggagcgatcagctcctttatctccgtgatttccggaagagtaagataatgcccctgcatcccggtccctgatcggcacgacttagggtccagggtcctgcataacatcgtctaacgcgcttttttcttctgctggctttagttccgtggggaatcacgcacacgttccttcttgttaatgtcatcgccatggccgtttgttcgttcctggtcatcgcccgcaaacgcaccgaggtcgccgtcgcgggattgctcgccgttgttgtcacacagggtcttggatacggtctcatcttcgacttgaacttcttccttcgcaatctgagtgttgtcggtggtctgcttatggtcctgtccgattcgtgggtgcgcaagaagttcgtccccgccggtctgccccagcttgatgaaaaggaccgcaagatgtatgtccagttcgctggtcgtgtgttgctgatcttcctcttcattgggtttgttttctctggcgattggagcttctggcgcattctggtcagcttgttcggttttgtcgcttgcgtcatggtcattgttggcttcaaggccaagtggagcgccatcattcttgtggtcttgctgagtctgttcaatgtgtttgtgaacaacttctggactgtacgtttactgggcgattgattctatctttggttactgatggtttcgtctagctgcatgcccaccacccgcaaaaggacttcgccaagtacgacttcttccagatcttgtcgattgtgtatgttgtctctccccaataggagatatgtccaacgctaacaatttctacagtggtggtttagtcctactcgtcaacatgggccccggccaattgagcatggacgagaaaaagaaggtctactagagcagaaggaggtcgaaacgcgattcccttctctctatatatctcccggcatctgcatcctagcaaacacaacaaagagggatagaaatcaacaaggggcggcctggctggtgctccgcgggctccgagcattcagatacgggcccttttcgacccttgactggtttgcagaggctatgcatggctgggttgggcgttgtttgcatttgggatgattttgaaacgccgaggagatccaacgatctactcgttattgcgtcttttcttttttgggttgttctaccccgcgcttttgtgtcctggtctcttctttcattgagatcgaaaacaatgtcctttgcatatgatgtttttgatgtgcatttgaattgcatctatcacgaagacaaactgaatggaaaatctaacgctgattgcgacgcatatctgtattgtcctttgcttaagactcaataatagtagcaatggctacgtctaatagaaggcatctagtaatattgagccgacttctgtccctctttatatatgtctctcttgttgaccattgtcaaaacccctatatgttcctgtgcagaattttacttgctgaggaagtcggactctgatgtatcattctgtatataaaatctacaatctagacatatgttgctcatatttggttttataatacggatatttggacggcccagatctaaatctagatgaggggcagcagcttctagagatcttgtataagaaccaccgagtttcaagaaacattcaactatatttacactaacatagtattcatctcgccgattaaatgtctaaaaagagaaaaacattcattgctggtcaaacgctatgtactggtggtaaccctaacagagagggagtgattatggtacaaggaagagataacatctaggaactaaagcaaagctgaaaagatagaaaagagaattccgcagggccacaaagtgagggagataaaggagagacaaggaaaaggattgtgaaatgataggaaggagtgctgtcatgatgaactcgcccgttctcttacggctgtaatgaaacaacgctgtgagggaacagcagaggaacttttgcaggatggaggtgcatttcgcttttatataccggaccagccaggtacattcctatgagggatctgagtccgacagcgagaggatgagtgtttgctccggtgttttctccgaggcagatttggcaaacacggaaggagtcttggaaaacgaggtgaaataaaggacaaacaaggacaaaaaatgactaaaaagcagatgctcactgggcttgatatgcttcaaacgccgtattgctaaacccggagaagctgatgcgaggggagatatggcgttgctgagggatgagtgttgtggaattcgcgttcgactttagatgtccatgctccaacgccaggggcggataggctgcaattgacccagaccaacatcatcgcggctgtcgtcgttgatctctaggtgtagcatgtggaccttcttgttgtcccggtggactgtggagagagtcttcgagatatgtgggcggtaggtcttatcttcatctgtggctttcgattgagggcgagatgcaggggtgtcagggtatttccattcaaagcttggagagtcatccgagagggtcgtggagaacatagagtcagttcgagagtgtaaatctgcgtctggaacattggagtcgatacggagtcgagtcaacgacggtcgacgttgttgatggtgctgggtggtgtcatcgacagctccgtcgccagactcgctgttgattcgttcagtttcattctccctggccacattcttgggaggccgggatatgttaccacaggcactaccacgagtcggcgaagtgacgtcggctttaccagccatcactcgggcactcggtggtggctggagcatccatctggtctcggcacggctacacggtccactaacaatgggcgggtggaggtcgttcacaggcggcacgcgggcgatgtagtacttggaggtttcgttcgggtctgcacgaccgcgtccagagaatccaatggacgatccgcgcacttcctgttgtccccaaagaggctcatcttcgcgttggtagcgcattgatttccacttctcgccgagtggatgcatcaggccagcactcttgtctttcttgagttgcgagctctggtcggtagtgcaactgtccgttcgttgaacagggcggtgaccaccccgacgagctggaggaccagggccgagggcgatttcttcccgccagcctacattggtactgaacggggttggttgtgggaatggacgaggttggtcggtgattaattcgttgttgcgtcgctccttctccttttcccgctgcacccgggtagcatcatttctacgtttccgacgatcgaggttctcggcgcagggggtgcaagtggcataatagaagaccgcggactgagcgccccgatagagccacatggctggcgcggggggggtgagtggggaagatcggtttattggggcttgttttgtggctaagagtgcaccgtcgtggacgacgggctatcagcccgtgaaatctgttgggattgacgcggtattcgctcgttgtgttgtagtgatactatcggacacatgaagggctgagcggataggggggaaactgcggaaaggggcgggatggcaaggtaaacgtatgaattggagatcgcccagcgatctgtaggctcaagagagggtaaaaaatagttgggagagagggggagagagaagagagaagtgagatgaaatgacaattaggggaggtttctgagggggcgtcgttagtttctgcctggggtgtttcgctttgagttgatattttttttcactgtttgcggcctaacctgggtattccacgttcatatatgtcaagatatatagacaattacaattcaccgacttcttctaaatcttcaaacaagttacaccctgcagtatacacctcacattgtcacaaatagcctcctaacttgctgcgccaaggccgacagggggctgaggaccgaggcgtatggggtactagataattatagagatcgaattgaactacggagtaccctgtccggagcatacaatctataacatcactgcctagttctttatctctctctctctttgtgatccttttctttcttgctacgaggatacatatgtactccgttgactccacaccgtatgagaccttggcatcttcccgcgtggagtcgagcaggaatgtggctgcaaacggtagattactcctttttgtagagaatgcagaagattggaatggtaattcagtagattcacattcttctggaccgtaggggcctacatctcatacttgaaagaggccaagtagtcgcatccccgtaaattcattgtctgtgccatcgtctgtgctctgggccccccgcaaaagtcattcgaggggcaacaatgccgagttgatggtctcatatgtagccattgcatcattgcacatcagagtcggatatgtcaatgaaatcacaacccgtgaaagatcgctgtaggttcgcagtaaataatcaatagatcgacattcaacagcgtatccatcgtggtaggccaagaagcccgcgatggcgaattcaatagtaaagagccacacgcaacgctggcaaactccaagattcttcagcttgctgaatcgttgtatcgcatgcaaatggtttccttaaaacgcccgaaaactgatggaaaatagcaccgtgtatgttgtaagcccccgctcatgcattcttcgtgcctcggattacttcgcctttcaccttagaccagtcgatctcgctgtccattttctcgtctatttcaccacacaccacgacattgtcaccgcggatcaggtacagcccatgctcaatctctgtggagggctcctcgtcgtcgggagtgcggatgatgcgttcaacggtattggccaggacaagattggtcgcttgatcggttgacaggagatcgccgatgagtgtgcggccgtcaacggtgaggatcaggactttttctgttcgatcgagagtggtcagcagttaacttctataggaaatggcgtatgtaggcactctagctaatgtagaactcactattgacgtaaaaatggagagacatgttggatgggagagcggttcaaaaaggtgaaagggtatctcaagtttgcggttgatcgggtctaggtagatgcaccgctgaaagatgtatctcgagcccgctgatgttcctgtcgctgggcctggagtagctctcttgctttgcgtgggctggaggaggttcgtgggatcttgtcacttcgcgcaaaaagtgctcgtcgaggtgaagagccggattgatcgcggttggttgtagcgcgacaattttgacttgccgaggatcctcaagctcgcggacggaagattcaatctgcaggagctccgtttaaagctcgaggccaatcaaatgggagttgatgataatggcgcagagcgggtctgtactgttggtcgaatcgcaagtaagattgccagaatcctagatgataacaataaaattctagaaacacgagagtcgatgacctcgactgatagcaaagagattggtggcagcacgtgtcttggggcttcatggttgttttccaggattgtcgattgacatccccgattcaatcacgtgcagaagcttgtaggagagtggataccacaacattttatactgttttatgagagatcaacgcgtttaaggtggaaaacatgggctttgttgtacaactgagctacacaatgagctacatagatgactctagtgtaaaaggatttatgtatagcaattcactatgtgtgcacgatatcgcccgcaatttcccatgcactccaatcagcctcgcaaagcactcagatccaaaggaacactgctgccccgtccagcgcggtatcggcggtctccaccgataaagtgccgtggtttggggagtagcccttcagtttggaatttgaatcgcgggtcttctattcggactgggccatgtccttgtgttgaaggactttgtgcgcctactgcaggcgatccaccattggaaagtgtatacgcgctagggtccagcgatgcaaatggttcgtgggagacagggcgagaggaagcaggggatggtcgggatggcggctcgcttggcggagctgcaggaagtgaaattggaggcggtgggggtggagcacctggggcagctgatgggggtggtgggggaggtgccgagggcgaagaatgtcccagggcagaacgtgcagcctgcgcagcaatcgagggggctattgaggggggaggaggaggtgtcgatctagaagcagccggcgggggaggaggtgcccgacccacgggggctgatgggggtggtggcggaggtccggacggttttctcgatgtaggcggtggtggaagcttgcctggtgctggaggtggaggaggcgcgcgtggtggcggcgcttcaggggcccttgtagctggcgctgaaactgtagatgatgatcgtgaagcaggccttgggggaggcttcttcaagccggcaatcaaaggattgatcggtggcgcaggcggtacatcggtcgatgatggacggggaggcggtctgactccaggaggccggggagctgttggaggcttgggggctggcgcagcaggtggtcgatgtgccccttcggaatcggagatatatggcgagtcacgattggcacctgtatcgatacctccacgactccgtagcttgggcattccaccagcaaataaacctcctaattgaggtggcgttggactggatgcaccatctgtccccgaaaccccttcgctgttacttcgtaatcgattcgcggctggaccggatggtacgggcggtgcaagcccgcttggaggcggccttgcgccaggaacaggtggcgcacctgcgactgggggagctgctgagacgcctcctgaactgccgattacaggggctgatcgatcattggtaacagccttcctcagcctggcgcccttgtgaatatcagaaagaagtgcgccctatctataggttagctgccaagttccttaagcgacaagctgcttgcggtaatgaaactgaagcacccagtttacctacccgatctttagcctgtcctttgggaggcctgcctgggaggccacctggagggggcggcgggggaggaccgcccaaacctcccggcggcggcggtggcggcgggggaggaggaggtggcatagttggggatcagataatgagagtatcagatagacagtttcatataatttagaaaataatcaggtcaggaagatgtgttcctggaataggaggaacatgacagagaagtaagaagacgtcagggtgcgagtacggggaagtggacagcgtcggggcgaagtctccgcctggactctcccatcgaaaaaaatacggctgcctcacaacgtcactcatcaccacagccatgaaaagagttgttctaacagccaataagggctcccagccacagggctcgatctgtcaattatgtcagttctcgacttcaacgccccgtcgtggcctccctatcgcgcgtctccccaccgctcgcgcaagtcgagctgcgacctccaatctccgtttacaaccctcgaatcgaaccgataggttgatactcggctctccttcgcttattttccgtcgatatgcttccgctgcgaccactaggataagcccagaggatgcaatcaaagagattgcgcaggatgcattggccgtacatcaatcaaacgcggcggcctccaacgaggtggtgatagaattgctacaaagatgccagctggtcgccaaatcccttgtcttacaggaacgggatcaaatcgagggatcatcaaagggcgagggcaacgcggtctcttctttactagacctggaggagaagcaacctgcgccgaagaacaaaggcaaaccacactccttacaacatccggacccccgactggcaaattcagtcgcaaaaatcgccgttgacctcttgaaggacgagaaggtcttcatttcgcccgaagctctggcctcctgcaccgagaccttgactctactgcgacgggccgagcacttccccgagctcttccacctttatgcctacaagcctgtcccagaagagggtagctctccggtgaagttgctgaaagccaatcccaagagtgtcaacagcgccgttccggcggagctggctaacatggctcttggggttgccattgcacagaaaaatctctcgctcgtgctggccatcatcgataatactttctgcgcccccgccttccaccgtgcgaagatcttcaagaaagccggcgtcccgctggctggccttgcggctgccccggctgcttgctatgctctcgcatcgtgggccgcaacattccagaacacaatggatccgagcgtagcgactgggattgcgtttgccgcttcactggcttacgttggcggtgcatcctccatgggctttttggctattaccacggctaacgatcagatggaacgtgtggtctggattcctggtatcccactgcggcaacggtggttgcgcgaggaagagcgcgctgctatggatagagttgctgttgcatggggttttaaggatccttatatgagaggcgaggaagttggtgaagagtgggaaagtcttcgtgagttcattggcatgcggggcatggttctggataagaccgaattgatggaaggcatggagtaacttgattccctgcatgtgtatcataagagtctcttgtttcacacataatgagcaatgtaacatacaaacctaagctttatctacagctacattatactggtaagattacgatagaatagcagattgagaccgatcatgagcttcatatttttttaaagtcgtgagactatgagataaacccaatactcaggcccaaactagaaaacaccggcgcagttaagcgacagataatctagtagacacggtggggaggggacatggaagccttgatgacaagactgccaacgttctgccagcccttcttgaggagggagacgaggtagttgatggcgagcatgaggttggcaacgagggcctccttctccatctcgacgttgccgatggcaacaccgaggcacagaaccttcttgagctggaacttgatggtggagcggacgtcggtgaccttgacggccatgtcctcagcggcggagacgggggtagggaacttgccggccttggacagaccgggaccgaggagacggggaatctgcttgatcagaccctcggaagcaaggaaggcatcgtacttgcgagcaagcttcttgatgagcttcttgttcttgttgagcttcttgagatcgtcaacggacatggcatcgataccgtggtgcttggcacggtcaagatcgtgctgatcaccaagaacactatagattccgtccgttagcttctatgttctttcgaggtgtatacatccttcgccgccgcgcatcgtgggatgtgaaagattgccccgcgggacgagttgtcgatgggaaacgcaccagatggccatgttggggcggggaacgctgggcagcttgatggtgccagagaaacgcttatcacgctggggatcgtagttcttcaggccgatctgaagctcaacggtctcgttgaagttacgcttcttctcattgagagagtagttgagaaggttctcgacattctggcgcactccggctgtaatgagaagagcagttagtggcaagatcaagtagagaatatcatggggtaagtcgtaccgactgtgatcttggacatgattgctacagtcttccaaaagaagttaaaattctgttggtatggctctgcgctgaatgcttgagaaaagaaattgtcgagggccgtgaatttctccgcttgtgggtgtggacttgcgctagtctagattaggattagcggtgccctagatttttgtttgctgactcatcaaacagcctgaggcatgaatacgaaccgatttccccaacctcggcaagacctacgctgtatgacggccacggatacttcactcaatgcaattccactcgctcatactccgtacaaataatcgcattagcaagcgtcgactcggcttgtataaaaaataatatcgagaatcctaatccctcttcgtattgctcggtcaggtcaacattgctgctgtttcaagtaaccgccggccttgcctagtacgcttttcctgttactgcatttggcaaaacttccaatattagaccaggtgaggactagttagtgcaaataatggaacatcgatcttgcttgtcaataatatgtcgggcacacacgaaacgaaagcatacgaagaggtctggacggatactaaattggtgattccctcggagaattgggattaaagtgataaattgcccagataagaagcacgcaaacttatatttcaaggttcaaagctatatacgattcatgtaggtatgtccattgtattttatagaacgtacggcatactcaggtagaagcatcgaccgggtcgccccgccacatagccgacccgcttatatcgatagatcattactttattatttatcctatttcattgttcaagaaagtgtctcgttaattgatatttctttgtgcagcgatagcagtaagggcttggatcggatatgtttataaataccttgttttcgcatatccccgaagatcgatctagatcaaccacaagcacgagtccgtattaagcaggcacaaagtagtccagctgagtagatacatcattttaacaggcggtggtatctgatattaattatcaaatacgtatacaccacctaaaaagatcttcaagactcctcgtcatcggcatcttctgaccacaaacaatatatatcgaatagtccagatgaccgaccaacacacaagcttttgctaagcagacgggtatataatacagcaacccacaaaacgagcaaataggatgctagatcatctattttaggacagttctcaactggtgaaacgaacttgacatggtctgcgggggctgcatctgatcgcagcgcttaaacgtgaccggcggcagtgtcagcctcaggactggtcacccaacccccctttggcgtcgagggctattgccttgtgtttcgatttaatttagacattcccagtgagattagaatacttaaacttgactttctgctaattccttttgtgatatactccaggtttacattctatggtcaaggttgtttacacctgggcatgacttggcttgacttaatccgagataccccctcctgacttggcagctgatcttttgaccattggctattgattttttttttggcttatttacagaccaccttgtttggctttatcatgtcttctacaacagattcgcgcgagtcaactgcaccgcaggattactactcaagtcttgacgatgagggcccgcttgtggaaaagttcaagaacatcgacgataagacgcagttttaccttgctatgcgccgtctacaggaccctcttactcagaatttcgtgctcgatttcgggaacgatgaggcatggtgtgcgtctgatctggacactaacgaattgaaacggttgctgagcaagccggtaagtctttttcgaagattagacttgagtctatccaacagtaaagggctgacatgatacagagagacaagtgctttggtacacggtggatgtaagaatgaagtcaaatgtagacgagtatatactgacattgtgatcacagcaatatatgggcaccagaggagcagaaggaaagcataagggtatgttcaatttcattcgcatatgagcagtattgactgaccatggattcctaggcgattaccaaatactatggagtgtcagaacggctacaggggatgatgtgcacagagccagtggatcctgcacccaaaactacacctgtaccaaacaaaaggacttcgaaatcgcctattattgagccgtcgttcgagcacgaagtggatgacccggagaatgcactcaagcatctcgccgatccagataaatcgcgcgagtcggcgtcattctcgaatctcaccttcgcacaagtcacgaatcaaatctggcacttctcttctgtggatcatggtcctcgatgtaagtacatcgcaccaaacccgagtgagcataaacattaagaatctgttagacacatgtatcggctataatacgttgtatgtgattcccacactatcacaaccgaatggccaagatctcccggatggaaaacggctttggacctggctgatccagtgcgatgatggtgagcatcccatttttcggatctcgagtgcagccgctaacttgtttgcaggcacaataatttcaatccaagagaaccccttcccgagacggaaggcagtgccaatagatgaagccaagccagtcctcgacatcgtgcgcaggaacatccgctttattttcgctggcgtttcgagacagcactttgccatgtccgagagcgagtcgctgattaccatccgagtgcgacattttagtgacctcggaccggatcaggccaatatcaagcagaaggatggaccgagtttgctcttctactatatcttcgatgactgggtgtcaagttatggacttatcgcaaagcgagaacacaaatatggggttgctttggagaaattggtcagtagtgtcgggaaagcacggttgtgttaatgtgttccgatggctaaccccgcgcagagaggccaaatgctcgatcgtccggttgtagatttggtaaacgaattgcactggctgggccgacgactcgcagttctcaaacgattgtaccagagctatgagcttatcatgcggcgactcttgcaacggcaacgcatgctccgcgacgaagcgcgttcgtctcaaccagccccggtttcgtatggagccacctttagcgacatggagtatgtagatatgcgccagtcgagtgtcgtgagcgatttcactttccatgatacaactgataaatcggtcggtgtgcagctgagctcgacggccgtggcgcgtttcgaacggttggttgatcggatcaatctgtactgtttgagcgagattgagaactgcctgaatgagaaagagtctttgacgttcttggtgagtatcttcccgtgctttattccgagaactctgctgacgtggcctagaatttcaacttaattgcgctcaaagactcgcaggctgttgaaaagctcactcggatcactattctgctggctaaggcgaccattttgttcctgccggtcagcttgatgagtgcgtacttttcgacggaactcgttggagtcaagaatgggtacaccaaggcggattactgggtcagtttcgtggtgatcttccttgtaaccatcttgctcttgaccgttttcggttacgccagcgatactgtcgaaggcaggacgatctaccggtccatgatacgaacattcttccgacggtctcgccagagaatgtcgcgacgatcagaagaataagagaaattggctatgacggcatgaagaaccgagagatggggtggaagaaattacgcaggcacgataagtgtgggaaggtcgggcctatcactcggcctatcagacacggtgggaccttttcctgagggtcttagcccgggggaactccctttggtatttcatttacggggccaacacggtgtcctctttctaggaaaatataccttcccgaatctatagctagttataggcagaactattagagtcataccatatatagtcgaccgaatctaaatcataagttgccttcttcatatatctctcagcctcattttctcgacgttgcgtgctctccagcaaaacgggtgacaaagactacgcccaccgccgtcggtctgcgtatttccacgtattcaaaacaaaaacgaaacaaatttcacccttctgacttctcttcgataattcccctgaacttgcatctcttgagactccttaaacaacatttatactcttttctgccggtaagtggttgatccggttttgactggctcgtgcccagacttaccccccttcccccctggatctctgaccgacaagtccacaacacgttttccaacccctccgcttctcccctttcaactacatccctcgatatatctctgacctatccactcctcccaggatccgagggttttctcgctaccgacaatatgggtattactttctcgcggttgttcgaccgactatggggccgcaaggagatgcgcatcctgatggtcggtcttgacgccgctggtaagaccaccatcctgtacaagctcaagctcggtgaaatcgtcaccaccattcccacgattggttagtccgcccctcgacccatctatcggcgacaccgtgatgcgctcttcgcaatttataagccgtataagagacattcaaaacccccccggaaactgatgcctagtgcaggattcaacgtcgagacggtcgaatacaagaacattcagttcaccgtgtgggatgtcggtggtcaagataagattcgtcctctgtggcgccactacttccagaacacccagggtattatcttcgtggttgacagcaacgatcgcgatcgtgttgttgaggcccgtgaggagttgcagcgcatgttgaacgaggacgagctccgtgatgctctcctcctggtgttcgccaacaagcaggatttgccggtaaggacttggattgttggaggatgtttgctagatgaaatggcatgctgacctcccccgcttttttttctagaacgctatgagccctgccgagatcacgcagcagcttggtcttcagagccttactcgccgtgcttgggtaagtgtcgtcccccgatttctatgttgtttacaaattcactaaccgtcctagttcatccaatccacctgcgccaccactggtgacggtctgtacgagggtctggagtggctcgctgatgcgctccggaaaaccaaccgcgattaaggtctataatgcgaattcgaatcggacgtgtagctgggtgaaggagaataccgatatctgcgaatgatggattgatgatgacgatggcggggagttctttggccatacatgacattgatctctgcaaggaaaggttctgcaactggttcgctacttcttttgatgttctctcttcaaacggctctttttcctctacgctatgctattagcctcatttgtttttcttctctccggcgtcgccactccaaaattacttctctgccttggaaccccagagatctgtataagttctcaaattgtaaaatctcagaatctcgattgggcaaggagagtgtgagagaacacaagaggaacaaatgagcaaatttcgaagtttcatctgctttctgctttcttatcttggcttgaggcctgtagggctcagtcggactgagtaaatttcagtccgggctcaggtaccatcacgtgatggattcacaagggtctgacagtcattccaatgttgtttttgttcaattcttatgctaaagtatggtaaagaagtttctactttgcttatgtctagccatggactttaagattatgtgggacaaaatatacatcagtaggatccacatagttagggcttatgtggacatatggagtccccggatctataggacaaaatgcgtataactgcgtgaacgaatgcttcaaacatacacagctctgactgccaaagacattttacaaacgctcagtgtctgcaggttcctggtatgaccagagtttcgtgaacaactctttctcttcgtcatctttagccaatccgatgaagatgtctttgaatttccggctattcttctgggctgtatcgtagtctttgggcagtaccatgccatccaccggaagcacagatccatctcgaaatattttcagtaacttcccgacaccatttatattctcctcttccttggaatgaagctcgacatcctgattggtgaaactgatcggacatggtacagccgggacgagtttttcccactgagcgaagagcgacgtgagtgactcgcgaacaaaaaaaagatcgcaattttcccacactcccgtgaccagccaaactggtttccggatgatggggatctttttattttgaaggacagaccagtaacgaggcgatagtctatacaccttggctaggtagtacttgtgaaggatctgactctctagatcgtcatcgatcttgcgttgttcttctgcacttaggctgccaaagtcttccggtctttcgggcacgacccagccttcttgaagaggcccacggtgggcacacatccttgggacatcggcatggtagaacaacggtgcaacacacgctgattgccaatccacgatacatgtaatttggagggtctttggatcgacgaagatgttatctagattaagatcggggtgcattagaacgtttttgacgccgcgtcgttggatgctgtttcgttggtagattgaagaataagatagggagcaactttcatatatttggtcaaaagagcaagaccgtcctcgggatgttcctggcttttgagtgaccgataatagttcatccgaggaattgcatgtgacttcatatacgcaatctcgttgcgccccaatgaacgagtgtagtcactgggatgcttccctatattagaaagacgaccagaagcttttcaccagcctgtcgattctcttgacttacatggaccacgatccaaatccatgccactccgtaccccgttccacaattcgccagtagtgagaggtcccatggcaaaaatatcaagggtgctggtcgtagcagactgaatgttggcttctttaggttcctcgcctagggagcgaagatcatccttgaagtaaatacagccgtgcatatcaaaagtcacaccagtcagagtgttctgaatgtcaatcatctggatgatcaattggagctttggatctcgagaccattgattccaaacagagcctagacaaacaccgggcgctttttcttcaataatatactcggccccgacatgattatttgcgtcaaaggacgatgctaggactcgaggaacagggagcttcaagacgtcggaaagctatgtaaattgaattgtaagattggatatagcaaaaatgaccggcagaattacttactaacttgcgtgtagcgatctcggaagtaattgtgaaccgagcagccccggtgttaggatttgggagctttgccaaaacttcgcaaccgttgtccattgtcaggataaatgccttgttgtgtaggccttctgcacattttgtgactttggtacctaatgaaactagcgtattattacattgcaaagtcctaaggacagcaacgcacaagattgagctccctcgcaaacactaatggcaacttgaacaagttgctgtaggtcaaactccacataacgtttagagagttctttttcttagttgaaccttgaaattcgagccaagttaaaattcattttcctaaagaaaatgaactgcgtagcttacagccaccggtgtctggtgtatcggtgcagatcttcctcagaaatcctctggtctggaggagagataatcaacaattcagggcagatcacagtgtattttgaatataattaccttgaccatgctgtgtctcagcatagagctcaggagagcagtgtcgtctgcctagacgagacgtggtgaataagctcatattctgagctcgggagcaaggaaaggcacgtgctcgtacacgtgtattacttttccaattgatccaacgaattctggaaataattcgcattgtcatcttgtagaataaccccggcgagtgtcatatcaaggtgcgatggggacttggaagggggttaaatttgagcacgtgctgacatgcctagtgagcctcatacaaatccgatataccaaaccttggaaggttacggagactcacaaccttattttgactgtgcgaggtagttctttccatttatttcgcgtgccttccaaatttcgattcttactttctatcgcatgcagatctattcaatcaatggaattacccacttcgtcacggccaaggaaccacgtttgctcgtgctttatgcggagtcgagacctgttttaccgtggccaaaaccttcttacagacacttcggctgtcctacgtagctggtaagtgtttgtgcaacatgccaagctgcagagtctatgatcgaacagtcgcgcatacgtggccagcgagcaaattatcctcgaagcccaccggattccgacctacaaagtttgccgaagctaacgagtatagtggcgtctatcgatcacacgaagctagtgcgggtctacatacatttcctcatccctctagttccatacaaaatgcagtctaagctctacgagctcaagtgggacctaaaaaagccataacaaatgggactatcgatcccatcgtcttagcttcaacgtatacgtatactttcgtggacattcctccgtttactggcaacaagctatgcaaagaactatgtcctagctcatgtgaagaagtgagacggggttgatgagtgctgtggtgcaactaagtctagggctggtcatgggttgaccatggaggtttaagtattttgcaggatgttacgtatcaaagagctctctagcactggagtatagagctatggatatgttcaatttcatcaactacacaagaattgtcgccggcagcctcgtgtcttttcggtagtcttcacagatattgtttttttcccccccaaatccagctaggtaagtatatgcgtacaagacccataaaaaggcccattaaatacacctagaaaccaaaatagatttaaaagaaacaagacgcaatctccagggctgatccgctcgggcttggaccagtccattttgaggacacaactgcgtaatccctcatttcttggacagcgccaacagtcttggcacttttaactgcagaaattaccgacttgggcccttggggctgcttatcttctgtttcgcatttgaatatcgtctagttctaggcagtttcgtctgttttttattgttttactgtcttcacctccttttagctcttttatctcttaagagcgactccggaccaagccccattgcctggccgacgatcaacaacaacacagctcatcgcgtgcctctccctccgtccaacaaccacccctgatttgggcaatatcgaacagatttttctatcgttacacttgttagatagatgggctggtaatcgtgtgattttggacaattaactacctcactcattcaatgttgacatattgtctggcatcatgactgttcaggcgaggagggcctccgcagcttacaaggccccatcaccatataatccacgagatacagacatcgaaaagcaacccgccaccgggcgccacacctatcaccaccaccaaagcgatgaccccgatactgaagacgagttgctggacgataacaatgtcgcggaatcctacccgccgcccatcgtagctggcggcagtcttcgccgcccccaagctagcgttggctttcgcgtaccccagcggatcatgcgctggctctgcttcgctcttttcgccgccctcgtcgtcttcatcctcaccctcttccgctttaccatctcctcctccgtctcacaagtcgccgtcgacctgcccacggtcggcgccccgaagccgccactatgggagacctttccgttcctcactcgctacgagggtggtatctcttccttggttccgcgctctgaaaatatacccgagtaccctggcgatggctccgaggacctgggtttgcggacggacagcgacgagcagaaggcgcaggcgcaggagcaggatgccaacaaggtgaccaagagggatatgagcccgaacatgttgagtaatgtgttcaatccttatcctgactaccaatcgccggaatacatagaaaaacatggcgagaagcgcgagtgcttcctcaatgcggaaaacacgctacggattccgtctatccaaagctaccccggaattccaaagggctttccagatccagcgataggttcgagcgagatactgggtattcgggacgacatgtgctttgatcgatttggccgattgggtccatacgggttaggatacggggctaagaaaggcggcatcggcgcgggcatggagggccaccgtgagggtgccgaccgcgtgtgggaggatgtcccgccggtcgatttccgacaagtggattgggctgctgcgcaacaccgttgtcacgcggctaatcgccatcgctttaacgagctgccggagccgcgtctcaaccgctttgtttctatgcctgtaggtattcctaaggtgaacatcccgccgcctgtggaagacagccgcaatgaaccgcccaaggttggacctgagcgtctgccgcgcactgcagtggttatccgcacatggcacgactttcactataccccagaggacattatgtacatgcgctccatcatctcagagctctcgcttctgtctggtggcgagtatactgttcacttcttggttcatgtcaaggatacccttttgcagatctggtccgatgacgagacatatcagcgtgtgcttgatgaagcactaccagaggagttccgcggcatggggactctctggtccgagccacagatggccctgatgtatgccggattggaggagaccatgactcgcggtctgccaatccacggtgtataccgcagcacgtacatgcctatgcagtacttcgctttccagcatcctgagtacgactacttctggaattgggagatggatgcgcgttacacgggccattggtaccacctcttcgacaaggtcggcgaatgggcgaaaaagcagccacgaaagggtctgtgggaacgcaatgctcgcttctatgttccgtccgtccacggctcctgggaagacttccggcagatggtccgcgtgcagaccgaaagcggtacaaactccgccaacaacatgtggagcgccgtcaagggcaacacgcggagtgcaatgcaccaacagggcgacaagtccatctggggccctgagcgccccgatgaacaggatatcttcgaggttgagggtgagggtatcccgcctacgagcatggataaggaccagtaccaatggggcgtgggtgaggaggctgacctagtcgtgttcaatccgctctacgaccccgagggcacgacctggctgctgcgcgacgacgtgacaggctacgacaaggagaatggcatgccaccgcggcgcaccgcaatcatcaccgcgtcgcgaatctcccgcaaactgctcatcaccatgcaccgcgaatgcagcctcaagcgccacagcatgttctcggaaatgtggcccgccaccaccgcacttcaccacggcttcaaggctgtcttcgtcccgcacgccgtctacgtcgaccgccgctggccgacccgctacctggattcagtgttcaatgccggtcgcaacggagcttccggcggtgctcgtacgtctatcttcggcgatcgcgaacacaacttccgtgggacgacctggttctactcagcgggcttctcgccgaacatctggcgccgctggcttggccttcgcgtcgacaatgacggcggtgaacagcaagagctggctggcgagggccgcatgtgtctgcctcctatgctgctacaccccgtcaaagaagtcaatattatcattgacgacggagagaaagtagaggaccagtgaagaaggagggagtatatatttctctcagaattggcttcgattcgtttcttgggtgtccctcacaccctctcttcctgccatctccaggattcatgcacgctttggggtagatgcttatttgtcttgcattggttctcataattactgtataatgacccttcattccccggtggcataacgtccccacgttttggattcccgtttctcaatttcggtgcgaaaaaggcgttcgcatggcctggatggccgggctatggctcacgatgcattctggattttcccttggtgcttgaccacttggtctagtcattagaggtgctagattgcgttctgcatcgggagaattttgtttttgcttgacctggactggatatttcagaaggacgagacggacttcttccagcgagggctattttggttacgaattgtttcttgcacataatttatatttttggttttatgatttattcgagtagaacatgggatgtcgctagagatacaaatatgcctatatacaatgcaattataacttcaacccactacttctactggtcaaccctggtcggcacaaagcaaatattacactcataaaccccatcctcgtcaaccccatatgtaagacaagtccgacacacccgatgcccacactcggtaaccaaaatctccaccctctccccgtcctcaacacaagcatgacagaaatgcgtcggaaaccttagcggcggattctgaaccatacgccgctcaatctcggaagcgagttcctttcccttctcgacgcgcgcacggaggagcgcggcttttgtgcgcagtttgttcatggtagatttgttgaaggggttatcggcttcttcttctgacgtcgtcgggcttgtgttgggcttgtgcagggtcggaaatggttcggggacgatcaggggtcggaagcgttcgcatatgggtctgtctcgcatgcaatttcgttcgaggtgatagcggcggaggatttgccggttaaggaggattgtgtagaatactatgaacgtttgccaggcgcgccattcggagactgggtccaaagggagggggaggagggttgagactttgctgggggttgttgtcttgaggcgttgggtttgggtttgagttgaagacatgttgaagttgattataatatgtttttttttccttctgtagttgagagggggtttatagcgaatagatcgaagtattggcttcacaagcctagcttgggctcttttgcagagagatgggagaatgtagaaaattcgccggccacgagacccggcatatcaatagagattatatcgatctatccaccccagaaccaaatatgcctctatctacatagcactgattggctatatcatgactcctgtgtcttctcgtccaagcaattctagattcggtgcataaagcattatgtccaggtataccatggatgtagctgagcgcgaaacgcggattctttttccctggcctgcgatatcggcagacattagcgtagacaaccggttccttgaggtgtaaaacaggttgagtctagatgctgtcaggttcaatatttgccattgaagtggcggaaaaatatcaattgggaagtgacgattgcattggtctagaactatcgagtctctgggtttgttgatattgaatttcttctatgttgtcgtgtttcgcattattttgatttctttcatacataccaaagggataagagagcaaagagaagagaaaaagggataattctaaaggtagatgctgtctcaacatgaaatatttccaactctgttccagagtctccagttttttttatccactctgcgatctcgatgcttttcttcagcatcacctccatctgcccgctcttgtatgcagcacaggtccatcctcagtctcttgtgtaggaatgggatgttaactccctattctctgctcttcttacacccttatcctccaaattgcccacctcgacgcattcccaggatatgaccgaaacccccctgaaatgaaaggtatacaaatactcgaccccagaacccgaatcgatactcttggcggatatcacgtattccccaggaatagacaccccctctttcctctgccgacagagcggcgtcaactcccagacccggacaagtcgatccgctgacagcctatccgctaaggccgaccatatctcaattcgggaagtggcaatatcaaatcccacttcagccaagcgcatgatgaaccgcacattgtcttgcccagggtgttcccctccagtcgagccatgtgtctctacacagacatactccctatcatatgccgggctagtcggataccgcgggtaaaagcctagagtcccaaaagatgcttcatgtccattagcacctgatgtatgagaggacttccaagtcccatgcagagcacgaaaaatagccgaggctgcagccttctgtgcggcctcatgaccagggagaagagcgtcgcgcaaagcacctagtgtcctatccgcctcgctctctgtacctggagttggggtattgccataaagatacctcgcaggaacaacaggtccagaccggccgtcgcctgcttctagtgccgagcgactaacctctagatccttcgcgaacgactccatcaatccgacgtagtcgcccatggggaactgaccacgggctagatccgggtgtgccgatctgagacgccgaaggttttgcttctggtcgtctgttttgcagagcgcaccgttattctcctcactccataatttcccaaggaacctcgcttgcatctccatcacgccccagtacgggccgcggtagaatccgacgaatccggcatcgggaatctccgagcggacggtgcctcccttgtcgagaatcaacggtgagaaggggtccgtcttgcagtattcaagcgtcatcaacacttcatccggtagcaatgatagggacttgtatggcgtgaacccggtggccatgactatcaccgccacattgtctatcgtcttggtcttcccgtcgggcccttcatactgaactgaggtttgcttaatatctggatcagaaatcacagcagtcacccgacccatcgatgtctgaatcgctccacacctgacgaattcggcgtaatcattacctatggcgacccatggtggctgggttctggattcctcggcaccatgtggtgcatccatgtgcgcgtatttctcataatcactgccgagcaaggtgtggaagtaactgtttgttttgactgctttttcttctggaatgggtccgaggatgtagtctattggacccgggggtcggcggcctaggtcgtacatggccaagtctaacggtaagaaagatggactcccatcgggagactcgtgtgggagatacgtcggcaaagcccagaacggtcttgaatgtatatgatgcacttttgtctcttgtgtatgtgggactctgtttgtggaaggtgtagatgaagattgccggagaaccacagcagatgcagcttcgacgcctgacatgctgccgccgatgacgacgatctggcccttcacatcgttggattcattagagagcgcctgctctcgttcataatggagcgaagagctatggatgattcggccttggaattgatctaggcctggtatgtttggaatatactgctgggcaaagtatccagaggcgatgacaatcacgtcgaaatcttcagaagatatcccatccagtaacccaggagtttcctccgcgctatatagtcagcatccagctcgagtacagcgacacgcgagtgagcaccaacatacctttcctgaacccactgaacattccacttcgggtcacctccacccccaaccctccgtatagttcttatcactctacaccctagcctcaggacatgagctggaacataccgctctgcataacaggccaggtattctccaacctgtctcgcctgaggaaaaatcggaatatccgcgtcggggattaccgactcccaggacagatctgaaaaagcgactgagaagcggctgaggttggtccgcatgcgagggtctagtgtaaccggggggccattggtctgattgggagagtgatggtgacttgaccacagacccccgacttcgttctggctctcgaagatgattggagagaatgtcccgctcggaaaattatgaagaagggttttggctgtgactaggcctgaggggccggcgcctgtggaatgcgatgttagtgtaaggtcgggtataccatctgggtatagagttgtatccgcggggtctcgactctagagtctggactcaccgatgattgctactttcttgggtgacatcttggggttggatgggaggtttgcaatgtacaagatccctatgttttgtttgtctgatgtgcttttcaatataacgttggaagtaacaactcggcagactcgagctgttgtcgctagacttaccccgcttatatccacttgggaaacagctcgggtttctttcttttctatataaaccgtggacatgtaatcatttgcatgtccggagtaatcattttgaatacgatgtcgtacattcgaagttgtataacatcgacaattagtaacaagtctacgatagtcatctagttaagcacaattcgaaccagcttcatatcgccacacccacaacgggcgtaattataaccccttaattcaaatatgtatacatcgatgtaccttgtacatctctttcaagttccaatacgccaaaaaggcggagcttaaggctctcggcgtgcataccagcaaatcatgacgttaacgccaagcataaccccagcaaccagggttcgtgaattccctcatggagcaaccacgaccggacaatttcctggcccccgaaaaaaaatgcaacttgagcgccaggactgaatttcccatattggacgcgtgctgtagggtggcgtaagagttcgacaaaaggtcgagaaaaagactagcggaactctatcgtattcgcatcgctcgtgctcatgctggtgctcgttccatatcggtttgtgtgcagatggtactttcagactcaggagactcgccgtagccattcagtaacttggatattgggcgagtgtagattaggcctgtatgcctcgtcgcattcttgttcggtgaccaaggtatcgacatttctctcggtcaaggggactctgtggtggttctttgttcggaggagttccttttccgcgaaggaggatggcgccagctttgagagtgtgtctcggaggcgtttgatgccactggggaaggatcgcggtatttgaggtggaccaaatgggttgtcggatctccatgggtagtcggaagtcacggactggacgtgcttcttaggagacagtgttctcgtcattgcttgcgacgttgggaggttgagggagttcgctgtaaatgatttgagttggaaggagtagggattttggtcaagtacgatataagcaattattatttctggccttgtagctaattccgcgggacccgcggtgttgccccgtcgtagtatcatcggatccctggttgtctatgctggtcattcatcacgcagtagtagttcgctagtcgccatacttcccccacaaatgtgtcgtgggtcatgatcggcggatgcagatcaacttaggctgatcaactatgtactattggggctcaccggttagtatttgacacacaaacaatggctgtacaataaatatctggcgaacgtactacgtcatggagatgccgatcaaggcatagttttgtagactgtcccagggaagagtcgcagagatggtgttttctgacgaataggaattgaataaatgaatacataaaccgtctagggtcataaggcgtggaaagtgtaatataaatctagcatataccagtatactacttcatgttcaattctcaatcgctacttaataagtaaatcggaaactgggatgatcatccccagcattctccagctcctccctgggccaatggtaacggtgatctctcttgccctgctcacgcagccgattttcacggtatacataaccaaagaacacaatacacgccacacctccgatccatatcatccctagactaacaccgaacccagttctataagtcggagcctcagagtcaaagaagacattgctagcgaccagaccgccacagttaccaaagccgatctgcatggccgaggcgatagattgcttgtaatgcccagccatgttgttactcacccagcccaacaagatcggctgcgccatgtatcctccaccggtgatcgcgtatatggcgaagtatcgggcagcgactggcaccaactcctgacagatgagaataacgtacccaattgtggcgatgacgcatcccaacatggtaaatgcgaatcgatggcggagtcggtcgctgatgaaggctgtagctagtgcgattgctgtcgcgacgaggtagatgggaatactcatcacttgagctcggacagatgtccagccgagctgtcggaggatggtcggggcgaagaatgatgttgcatagcctgtattgacgattccaaagtacataatagcactgaaagcgactaattgttagtggaagctatgtaatatcggcactcaagcttacccaagatagatcttcacatctgagaatgtccgcttgatggccggcttgtcgaagcgattcatttgcgcttcgccgcggtcgtccgataggcgccgaagtagcaaagcacgctcttcctcattcaggaaagtagatgtttcgggccaatcgacgatgaggaatttggcagcaattccagtgaatactgtaagtaaaccttcaatgatgaagatccagcgccagccgctgtatcctccgacactatccatctgagctattccataggcaagaagctaggagaatgatttagtgtagaatcaactcatcatgtaggcaatacatactccactgactgcgccagccagaatgcttgcgctgaagaaaatgttgaatcgccattgcaactcgtggcgcttgtaatacatagcaatcaagtagatgcagcctgcataatattagtacttgtgttatcaagtcagggatcaactatccaacctggcatcaatccagcctcaaacaagcccagcaagaatcgacatgcaacgaggccaccaaagctctttaccacaccttgacatgtggtaacaacacctgatatcatcgaggtcagcccatgttccttgatcctatatcggttcaaacataccccaacagagcatgatcccgctcaaccaccaagatggcggtacctttttcaagaagagattgctaggaacttcgaaaaggatatagggaatgaagaagataaagagggcgatgttgtaatcatgtccctccatccccagatctttctcgagaccctgaatccgcgcgttaccgatattgatccgatcaagaaaggcaagtaggaataaaaacatgagaatgggaacgacatggatatcgagcttccgtagcagtcgtttctctgcggctggatctatgtccggcacggaaaccgcggacttgacatcctcgaccgtctcctggtatattttcttctgctccattttggatatttcagatgaacctcaaattgacacaagcggccaccaggataatccaaaatatggtagagcaatagccccttttatatacgtttagtgccagtcgatataccatcgcatctggggaaatccggggaatccggggccccgcactacaagcccgcaccgcgatgttgtgttgattcattccgcgttctttgatcgctgtcggtatttgattccgcccctaggaatgccaagaatccccggcttggtgtgtagcttcgtgtctggcatgttgcccgccgggtacctggtctatagtcactgagtatgtatttgatcgcaggtttgttgatggctaggcacttgcgaacctattcacttggtcagagggttatagctcgaggtcttgatattgtatatatccaaagccatagtccaggagcggggtatacatttgcaatttacgatttggggtggcgttgaaatataaagttcgtggccagtgaagccgaccctatttatgatgacggaatggaaccgcatcatgccgcatagagggctcttgaatacgatcgctcgatagttggaataaccgatatcaatatagccgaatatcgaattcaaatctaagctaaggtggctagaattgggccttatcatgctgaccctctcacgagccgacattcttgcgaatagttggctccaatgagaacacctgcttatccgctgcaacatccttgtagactatgtcccagcgttcttggagctcccgaggtgtttcccatgcgttttcagggtctcgcagccagagtcgcaacaaatgacgcctaatgtagccatgccgttagcacatccatacagcaataatgtatacgaacgaaaagaacatactctttaccaggctcatctttaaatccattccgcgcatggaaaatgctaagattgttcacatactgcacatcacctttctggaaatccagagtggcactgtgctttgccgccaagaagtgcaaggcgtcgagcgcctcagcttgcgcctcggtgataggtgggatatccttcgatcgaggctgagccaggaatccggtgaagtatcgtcttgcgtattgaatcagaaccctctcgggggtagtggcagtggctggttggtggtatagaagtgggcggaggctgtagggcctggctgggttattgaaactaaacagtgttaattttaagtctgcttccttggcgcttggtaatccttacccatctactggccaatcctgggacagagtgtgaatgagatcaggtctttccttggccaggatgttatacacattccagctgctagcaagatagctttctcctccctctgcggcgcggttcagacagaggagtgagattatatcgccagcatcagtgtggaaaacttgcttgtcagacgtgtttgacggggctccgataagcttcttgtcggtcgtgctagtgaggtctttgatatgggatatcacgggcgagttgccatccgccagtcgagcttcttgctgccgtcctcgaatattgccgatgtgggaagatacaccggcatatatgatgatattgtcttcccgggaataattatcgatgcgcaacccccggagaacgacgaatcctcgaccggtgtggatctccttcgaaaggtctcgaaggacaggccgcagggtaggtagaggaaaattcgactgattaatatgtcccgaggaaagaccaagagctgttaagtcagcaatgggaacttaatactgtggtcaaaagattacttacatttgaagctcttcaaagcagcgtcgagttcatctagctgatcatcgctcaactgataaacccaatcatcccgcttctcgacgtcttttccttcccagactagtgacgataccagcttctgtgggaagcctgcaggcaaagtggactgcaggtcctcagtctcctttcgccgacgagtacgctccttgtacttttcataatcaggatgatactgaatatcgggctgggtggccacagtgatagtctgaacagcggacatatttgttatgcagaagagaaataacagatgtcagatgaaagatccttggacaggtttatctttggtcacccggagtgtggtcacgacatcaaccccgcaaagcgcgagataagtcgaacaacacaggagaaccttacagctaattaccaacttcaatcgcgtcaatattcgcaattatccggaagtgacatccatttcagattcttattttgacctttctgtctgtcaatatataatcatagggagaaatgggttcgatttgaaacattaatttgaaatataatgatccagtgtggtgtaaaggtcggattatgattatcccaccttaaccaatgtatacaggatgtctgatagttgctcatgtcttttcaaagtcgttgaatcaatatagagaccatcaagcttgtattgcggaagggattgcgggccggaggcttgggacttgaggaattaagtgaaggataaagcggtgctattaggcctcttgcatctagtagaattatgttaaatcaggaagctgataatatatatttctcgccttctcccattagatcgttcattcaccaaaaaccgtggtagtagatcataatcatctctaattttatttgctcaaagatatatattaagcagaaaggtaacagataaaacgagattcataaatcgcgctcggcgcgcttgcattagagactgctcgtaacattttcaaatatcaacacctaattgatcgcatatagataaattaacctagttccgagtatgctcaacagcaacagcatcaggctgcttgctttcttcgtggctcatctgaacccccttctggtgtgccatcacctcctctccccgagcaacatggttagcaccgccaaatagaatatcaatctcctcaaggggaacctgcttggtctccggaataaggaaccaaacgaagacggcaagtaggaagttaataccggcaaacatgtagaaggcatagaagcccccctcgttgtcgaggaaaagagggaagaattgctgcacgatggcgttggcgatgttctgagtctgcgatgccatacctacggcctgtgcgcgaacgttcattgagaaaatctcggacgtccagatccatactgttgcgccccaagatggtttgtctgaaaatgatgttagtgaagttccgtttgcagggaaatggtaagtagaaggaacttacagaataagatgaacaagaacagaaggaacacaatcgatataccgacaggctccgacttggctccgttggcaagttgtggtgtttctgtttcgacggcggagacaatgatcatgcagagacccatgccgataccaccgacaatcaagaggaactttctcccgaatcgatcaacaatccagacggcgttcagggtgaagaaaattccaaaggtggcgttcagagcgttgatcagagcaatctgactgtcgctggtaaacaccttctggtagatcttggtagagtatgagttgagtgagccttgtccggtgatctgttggccggcattgagaaccagagctagacccatgcgcttgcggagagacttgtctttccagagagccgagtaattgctagagatagcttccttctcgtattcgatagcctcacgaatctccagcagctcttgctcgacttcctcctcggtatcacgaactcttcggagagcttcacgggccttctcgatgttgtttcctctccggatatacctagtaatggtcagaattgctcgggccaatcgaaatcgccaacatggacttaccaacgagggctaccggggatagtcggcaggagggcaaggatcaaaataggaaccaaaagctggaaaataacaaccaatctccagtcccactcacccagctggggaacatttttagtgcaggcaaagttgatccagaagcagatgaacgatccaacagagtagaacatctgccagaaagtcatgatcttaccacggatctctggcggagccaattcaccaatgtagatagggcccgcagctgcaaaaacaagctgtcagtccccgtcattgaaaccacaggatcaacaagacttactcaatgcgataccctggccaataccaataatgcatctaccggcaaggaagcaggcaagatcgtggtgaggagcgaaggtttgcataaaggtggcaataatgactaaaatacagccaatgcccattccaagtttgcggcccaggaagtctgcacacgggcctcccaggaagaaaccaccaaagatagcaccgaccgtgtatgctgtattaattgagccgattgtcgacgcatttgggtggttcatccaagcgagccagttcttggaaccctggactgagttgaatacagatgcatcgtagccgtagagtaccatacatgatgctgcaacgcaagagatgtacctaggaaattagattagggtatgttcagcggattatatgactgtgcaccaaccaattgtacgctctcttacgggtcattgaaaaagtcattctgatgatggcctgtctgttctaacagtgtgatttgagatatagaaccacactgcaatatattttcaacttctgtgggcagtgacagacgaacaactgttgcccttagtgtgagagaacagttaaggaggagctacattccagggggtacctgagtgggcgaaggctgcagctatataagaaagtacaagaagcgatcagggcgcgttccgggggtagaaaatacaaccccagtccatgtgagcaggtggatcagaccatccccagaatcaacaaaccccggatgtgccaagagtgcttttggcatttggataacggggagccctcggctccaggatcgctgagtggtgggtatctggggtcaatggcacaagggcaacgcatataccacgcctagtcgatttctcattggctttgaaaattctcacatgtgcgggccggacctggggtaatggacatctggggttcgaggatattttcaagcttttgttccggcgagatgaagttggggagttttccacgaataggcgggctggacgacagtggcttaggagaaagtcaagtccaccaataggggaaatggtaaaggacagtatatttaaggcaaaaagggcgctaaaataaacaagtaggagatacggggtacataataagcgactgcccaggtagttagacttctggggttcttttaggctggagatagggctgactttatccttataaagagacgtggagccggggcaaccttttcttatgttctgctgataatacattctttggcatctctatttacagagtttcactagaaatagattgaataggctaaaaatgtgaatccaagctaacaaggctctaataataggctaaagacactctggcaaaggaagcatgacttgagtaatccgtagaaagattcatagaagagctttggggaagctctacggagtaatatatgttgaattgcttttctgtaagaacagaccaatctgccttctatggataatcacctaggagctgcgcgcgcatatctgcatgtataaaacctgatcgaactatcaatgtaacatatcaagatatttccatttcctcctttcacttctagaattaagtatcagtccgaaacattcgcaattcctctcactttcgcctgtaagtatacatatcacgtgatctcgtgatttttcacaacgcgatccgcgacagcgaaggtcccactggtataacagtctcaagctttatttttctttgaacatattttcttttgtctgaatttgctgtgacctacctagatatatgatcccggcactctacctaatccagccagttctgttattttgactacaagcaatgccaccccgcaaatcgaagaaaaagcagacgcgacttgcctttgctgcttcagccgcttcgccttcggcggatgcgagtccggagagtagccgatatgcaacacttacatatgatcacccaagcttgggcacgtaccgtcctccaaagtctctcaacagcgagtcggggacttcgcccgcgagcaaacgtccgaagctccccgccaagacgaggtctaaggataaacccacaagtacggtgatgatctatatcctcaatgctaccagaaaactaagatgcaaaagacgaactgttcgtagagaaatcgagccatgaatccttagacgaaacaatcatccccgcctcccagaagaggaagcaagtcgcgccacccgacaacctcgacccggtaaatctcgatgacgcccaagaatcgaagaattcccgctcgcgaaaatcacaacaatccttggaatgctcaaagacagatagcgagagcacaaatggttctgattcggaggagctttcccggccgcgccgatcactcaagcgaagggccccaagctcaccgattgactccagcgactcagatgagccagtagcctcttcggcccccaaccggcgtaggtctacccgaggtggccattcttcaagctcgcctgttatactcagcggtgattattcaaacgagtcagtggctccttcgaccgccaagaggcgcagggtagcaaggccagccgtagtttcagaacgtgatgaagttgactcggacgaaccattggcctcctcaccagtgaagaggctccgacgtggaaaagcgaaagaaagtccccaagccccccacacccccaggcacatctcgcagcaggccagacttgatattgcagaggatttggaggaccttcaggattcgggtaggaaccaattagcgtacgaggctcgtttatttatgctgatgcaatcatgcgtagttgttaagaaaagtcgaactcgcggccggaatgtcgaatctgcccgagacaaaagaatgaagcacctcgaagctttgcgccgcagacgggctggtatgaaagatgaggaagaggaacaagaagatgaggaagacgacgatgatgaagaagaatccgatccagatgtgcaggagattaaacaaccctctgttcgtagcctctggcgacatgacgacggtgacagcgacatagaatcagccattgaccccaacgagaacctcgatcggtacgaagatgactttgtcctagaagatgaggcgaacgaccttggcgttcccaccgaggagctccccttcgagtttacccgacatgcatataagcagccgaaggaatacttccgcgacgtcatcggctggatggtgcaaaacaaactgaacccggccttccctcgctctgacgacatgtacaagatggcattcatgaagctggaagatgaagtcaagggtcgggccggttcacagctgatttcttcagtttggaaccccagtttcgtatatgccctccaggcccggccgcacatggaggtcgatacctttcctacagaggataaccatccctgcgatgcttgcaggcgctctgggcatcccgcgtctcgagagatgaaactctacggaaaggcgtattccctgcaaacgttagagccactggaagatgacagcgatgaggattccaataacgacgacgatggcaatgatcgggaccgggatggccatgtcattcctcctgagaatgtccggtactacctaggaaagtaggttttgtcttcagacacccattcgatcgagtccccctctaactgtttcttttattttaacagacaatgtaatgcgagagcgcagctcacccacacccttactcactggcgctaccatctcaatgaatgggtcatcgacttcctggagcgtacgggccacatggatgccgacgagatcctccgacgaaatgatatgagcgtcaagcgtaagacgcgaaatgcaaatgatgtccttgacagcatgactggaagtggtgaagtcgataagttgtggcgtgacttccacattaagctcaagtctgcccgcgagaaagaggtatgttcttgtagtggggtctcggtgcttgatgctaatcgggtctgtccttcatttagtctatctacggatgatgagatgatcatatccaagaacaagttcgagggtcagtatttgtcctcgaatggctttatcatgaattttcatgaagtctgaaccttgtcactacatagttttgtggcatcgcttttcttttgcgaagtttctccggtgctcctttcacaatgataccctttttttctttctttctttgcacatttctagtcaggtatgtctagctagcctaccaaaaagtacctgcaggttcagccagctatctcaagaaactatattcgcccaagagcctactgagtatctatctccaatgcagttttaggtattcgtaggcctataagtatggctgggattacaatttgcgaagataaccaaacccatccgttttcattacctggacatgcacatggggagagaaaaaaaaaaggtgtataggaaaacaggaagaaagatgattggggttgtacaaatacatgcatgcataagctgccggagccaaaatgtcagaaagcatgagagatgcgaggagagaaaaaagggaaaaaaaaaacaagaagtataacaaagatccgaacaagtcaaaacaagacacgaatcgggaaaccaactctttccgagtgcttgtagtcctatattttgagatctggccaaaataggtgattggaaatcccaggacgtgacagaattttgccgacgtgcgcctgggtatgctgtctgcaggagaccaagtgtcgcggccggtaattgtgtcactgggtccttcgccaatctctctgctttccgaagtggtattaatttacagagtaggttgagccgtcttttcgggttcggagccggggatgagcatctgcgagtaggaatcataattagtatatcgtttcaaagactgagagtccgccgaagagcgcaaaaaatgccattcgatgatagtgtcgagaaagagaaatattatggaagattgccgagatgcgaatacccgaggcaatgtacacggtgtcaatagtgccaatgacagcacgaatcggggattcaagataactgttgcaatgccgaaaaatccggagcaaaaaaggtgaaaaagaagtaaaacacatacctcgttagctcccttgatcattccctgctcgcgctccatctggatgtactgctcctcctcggcgtaggccaaagcgaatggcacaccgagcaggaaagcactggtgctgataatccagagggccttgccgctgaacgaaaaggtggccttggtgaggtttgtgatggaagagacggtgctggagacgttgcggcgggcggatgggggaacaatgtctttcagagcggcgatacgctcgtagagcgactcagcctcgagctcgatatcttcctcgtcggagatctcggagtctattttgcattgatgcccatgttagatacggtactttatgttgatttcagaccagtgttcatttctgggtttcgatgtcgcattgttgaggattgggattggggactgggatgataggaggaacttcagggagcagaatatcttcccatcaaagcgattccccatgcaaatgacaatggcgcgatgcgagtttcgtctgattatgggcgttcgggtttcggtactaaccagtgtctgagtagtcatcctcatcatcggagaccaaaagagcatcgtgtttggtggcagtgggcttatcggtgaagtgctcgtcttcgacttcagtgagcttgaccattttgggcggtttgggtggtttggatgagaatgacgaagggggtctagttaaaggtgatggttgaatgatgggaggacgctctggtttcgctccgacttttttgccgaaaagcggcgaggagcttggacccaccgacaacgatgtcatttgttttcgatcttatgaattacattagttagttactgatgtttacatgaacagtcttttggtgggctttttagtagaaaggtgagttgagaaaggccatgattttaaaagagaggtgtattctacatagtcgaaatgctggccatagtctataattacagattaccacatgacccttatattcgacgcatccaagcgagtcctgaggcatagaatcatctatttaccgtcggccaagcttccaccgggcaatccgttcttggatctcctcccaggggaaggaccggagcttatagccttccaactcgccctcctgcagcacaacagtaggcttaccagtgcccttaccctcattgtggacatctccaccaaagaccttgcgagctacacggcggaggtcctcgacggtgagggcctcgatctgctcacacatctctcggacactgaccttgcggccgtggacctgcacctggcgtccaagatcctcaagctcgaccatgcgagattctaggttcatgagcagcgaggaacggagctggttcttcgcacggttaacttcctgcgcttgcagcgagctgtaaccagtgtccagagtcagggattgcagctcgcggcacatgacctcgaccatctccgtgatccgagtcgggctgcaggatgcggaaattccgaagattccgctatccgtgtagctgtgattgaaagcaatacagctttcgacccaaccgtgctggttcagcacgttggtgtagagtcgcgagtacataccctttccagggccaccggccgagaatgagccaccaccaccgaggagggtctggagagtagcaagagcgtagatatcaggcgaggagatggggagagcctcgaaggcaaggtggatgtgactcaagcgagggagcatggggctcgcggggggaggaatcgaagggagggcgataaagccacccgtgtagtgagcaggttggcggaggttgagcgcggatggctcaaccagggatgagtggagaggctcaactgcagagctcttagaggaagagagattcttgaggaaaggaagctttgacaagagcgaagagtgtgttttttgagaagcagccggactgctgattgtcgatgagggcgtgaacgaaggaacggtcggcacctggccttcgtgggcggccgctggggaatcagacagtgtggtttcgattccgctgccagaaagtacaggacccttggtcttactgatgtcactcggcttcatgtcgccaaagtactgctctgtgagctgaacagcctctgcatgtggcactcccgcaaaggcaaccaccatccgatccgggttgaagaaaagctccctgtaccgctctaccactgccttgttgatttcgcctagccgttcttctgggcacaatagcggatttccaagagtgttgttggcataagcagtcatgtgcaccaattctggaaggatgagttccggcttcgcccagatctcgcctatctcgtactccgcagttgcgagctgttggataacctcctcttcagtgatgaggggatctcgaatggtctccgcaagcaggccgagcgtggtaggaactgccgagttgaaactggcagactggtacatcaaggattctcgagatgaggcacactgaatgttaccgcctagggactccagaatctcaagcatttcatctccagtgcgcgccttggtagacttgaaggctagacggtccataatgtggctgactccgcgcagactctcatcttcgtagcgagatccagcatcgacgtaaactccgacaccagcgaagggacccggtaatgattccgtggccacgcggactccatttgaaagtgtggtgatttgttctagctcggcgggatcctgcggagaaagaaatagttcgtcagttacaaatgacgctgtgttgtaggacctatcgaggctctcttaccttgaccgattcattgacggtagagaggcttcttgacacggcgcgaggagctcgtgtcaatggcttcgcggactcgatggcccgcaatgctgtgcggcgcatagtggttctgtacaaatccaacagcctgattaattcgggatttcttggttgcaccgaatatatccggtaaaggtgtgatgtagctcggacggattgtcggcgaagaatcgtaatcctcgatccaaaatgcttagctaatccgttgcatggtggattcttacatattctgttgacatagcagatcaaagtgaataactaaatacttttatgatatttttgacaagaagcggtgttttactgattttttgacatcattcgtgactggcgtagcagggagtgtctagtccgcttaccccagggcatgacctgcagggctcgaatatacaccaaaacacatggacgtggaatctgaatggaaatttgcagaacaatgagtcgtcaagttttctatgtactaaagattaaataactaagggtgttccgaagcccagtttctataccaatctagacatgaagcattcgcaacacttgcaccaatcttgatgttaagcccacacaaaatctgcttaacagcattctccaccttcttgccattagaagtcactggaatatcaggacatgcgtcaataataccagggacatggcgcgggctaagctccttccgaattgtggactgaatgcgtgccgcgagatccgccggcatacccgactcgttgccagcagcaagccggacaaacagaacgacggtttcatcggtgtcgataccatctcgtctccggccaatgcaaagagaatcttccacctcgtcggcgaaatgcttgagaagaatgttgtaaatttcggcacttccaaatcgcactccggatggcttgagtacaccgtcgctgcggcctagcatgaccacacctccagtttgtgggttcaagcgcacgtagtctccatggtgccagactgtgggcccgaacaaatcgaagtagctcttccggtacttctccaagcctgttggtcccgggggccagaacatgactggttgggctgggaagggtgtgatgcagacaagatcaccaggttcgcctgatgcgctgatatccttgccagcatagtcgaaaaccgagatgtccatgcctagagagcggcattggatctctcctttgtaaacggggagaatagggcaaccggaggcgaagagagagaggatgtctgtgccaccggtgatggaaccaagcataatgtcgtcgtggaaagaggaataaacgtattcgaatgtcgatggtgccagtggggatccagtactgaagatggcccgtagggacttcaacgatactggcctatgggcatgctcgcgcgggttcaaagcagcttgttcgaggagagagaggtatttagcggatgtaccgaaatgagtaatttgaagctcttcgatcagtcgtggcatggccatttctccctttccgccttcagtgtcaaagggtcggaagggtgaaccatcatacaggacgattgttactccactggccaagcccgataccagccagtgccacatcatccaggttgtcgttgtgaagtagaacaagcgatcacctggtcgaatgtcacagtgaagaagatgctctttcttgtgttgaagcaatgttcccagagatccatgaacgatgggcttgggggcgcctgttgtaccggacgagtacaagatatagacaggatgatccggtctcaagcttgcaaactccaatggtgcctgggggttcttgacctcagacaataaatcaccgtagacctttgctttcccatttgcaggtcgaaggtcatctagattttcgtcaagttccggagtagtgataagggacaccagaagctcaaggtctggcagttccgagacaatctccgctaccttcgcatgtgagctgtgtaccttgccattgtagaaggagccattgtccgcaaagagaaccttaggttggatctgcttcaggcgctccaatacagcatgcacaccggtgtcaggtgacacaccagtccagaatgctccgattgaggctgcggccagcattgccacgacggtagtagcatggttgcctacgaagccagcgacacggtcaccggtcttcacacccgcttctttcaaggcgtttgcgcactgtcgaactcgctcccgcagctccttccacgagatatattcgcgagctacttcagtggcgccaatcactgctatggaatcttcatctggcgagctggcgggatacagaagattctcggcgaagttcagagtgctgccttcgaaaaatgcaggtctagggaatagcacttcttttgtatccagtacctatgttgatcggattaggatcggatagctcaagtataaatgggaattactcacctgttcgtatggattgtgggcattgattttcgtatagtgccagatttcctcccagaattgagctggctcagagacactccatttccagagcgcatcgtagtcattcagtgacaagccatacttctcgttcactttagtcatgaaatcatagatctgggttgtctccggggcggagggtcgccagagctccttggcctctggctcaacgatttcgtcgatctgagacatagctatgaggtttgttgcagtagtgcgcgcaataatgccaggaattgaacttcggagtgtggagtgtggagtatgtctgtagaaatgccgattgagattgaaatgtgctcaatctcttgtcacactagaaatcccagacaatgtagcaattgacttcccagcagacaacgatttgatagggcttcacagggtcaatggtcaaagcttgcagtcaaaagcgagttcacacaatgcaaataccccagggggatggcggggcgggaatgatcgggtactgagttgccgatctcctcggctacggggaagataatttctcacaaaccgccccggatatgcattgtgaattaaattatgccgaaggccgaatcttcaggtcggtcacgtttagaagtgacggcctcaggctccaaggttgccattgccgtttccgatcatgattcacgtcacctccatggacatcgggatgtaggtgtcacggaccttgaaaatggacatgatgtgactataagggtttttagtcggatatgccggatgaaccccttatttcataacatgatattacaatagatggacaattatacaacgtctacggagtagagatagtattgctgttcacaatccaatatttatgcatcatacgacttgatttgtctctgtaacttgggtctttcgggtccgagactttttcgagtggaaaaaaaaccccctagtattgcgctggtaatattacatccgcactagcaattatcagccaatcacacgtaattttcgccgtactgcatgcgtttttaattaataccaggaggtcactgcataatgggtgcttagcatgggaaacacggaggtctcgctcttatttaccttctcagactctctccttcttcttcttctccaaccctatactcggtaaaggtgcttcattatctcggtttgtagtgcaacggaaattggtcccttcgtcatccgaacgtagggctctttgccccttcgtgcttcttgcccccattccacgtgcatccgattttttaagccctttcggagtattcggctcccgctcacgtcaaatcaaccttgcggtacgtctcaatctgtgaagctgatgaccggcgagtttctgagtcggagtgacttgggaacggagcatggctcagagtgtcgcatcgatgcctggtccagaacaatccactaattggctgcggtttccagattgaacacattgcctgaggttgccacgactttgaagaccgctggagtttccaagaacacttgcccagtcaaacacatcgattatcaactacttccgatagtccctgccttaactcgtcaacatccggacgcgctcaccccaaagcgcccctcgatcctgacgtgagaaaaaaaaaagaacacccgtgccgaaaccttgcgctgtttcctcttgcgatgcctcgtcgatttagcaacaactcctctaccgacacctctaccaacccgccgtccttttcaccttcttcgggaaagggcggtatctccactaagggccccacggtcaagtccaatcgcctttctcagttattctcggcctcgccaaagtccaagaccgaacctgtgcagagtgggcatcctcaacctagcaattcttctccgccgataagtttggcctcactgtctctaccgacgatctctctatcaacagccactgcggacaatccgaacatggacgagctgcctacaacactcttccagcctccaacccctgaggaggctcgtcggctggccaagcaacatgcccagttcggtcccatcggtcatcctagccaccgatactccagccgacaccccggtggtgtcttcccggagccggtgatggacgagccgccgtattattacctgctcaccacctatatcagttacctaattctaatcgctttcgggcatgtccgtgatttctttggcaagcgattccgcgaggaacactaccgccacctcaagcctcgcaatggttatggcgctctcaacagtgatttcgacaacttctatgtgcgtcgtctgaaattgcgtatcaacgactgctttgagcgccccgtgactggtgttcctggccgtactattactttgatcgatcgggctacggatgaccacaaccagcacttcttcctgacgggtaccactaccgacactttgaatctgagctcgtacaactacctgggtttcgctcagtcggatggcccgtgtgcggatcttgcagaagaatccatcaagaagtatggcattgccgcacccagcacccgagcggagtctggcacgcaggatatgcatctcgaagtagaggatttggttgcccggtttgtgggcaaagaatcgtctatgattttctccatgggttttggcaccaacgcaaccatcttccccgccttagtctcgaagggatgtctcctgatctccgatgaactgaaccacgcctccatccgtttcggtgctcgtctctccggcgcctccatcgctatgttcaagcacaatgatatgaaggacctggagttgagacttcgcgaggctatctctcaaggacaaccccgcactcaccgtccctggaagaagattctggtcgttgtcgagggactgtactccatggaaggttccatgtgcaaccttcccggtcttgtgcacttgaagcgccggtacaagttcaatctgttcgtcgatgaggcccactccattggagccattggtcctaagggccgtggtgtttgtgattacttcagtatcgatacctccgaggtggatatcctgatgggcacacttacaaagtcatttggtgccaacggtggctacattgcagcagacaaggtcatgatcgacgcacttcgtgccaccaactccggtgtctactttggagagtctcccgcgcctgcagtgctttctcagatctcttccgccctgcgcatcatcagcggtgagctcgttcccggtcagggtgaggagcgattgcagcgattggcttttaattcgcgatacctgcgtctcgggttgaagcgtcttggctttatagtgtatggccacgacgattcaccaatcgttccactccttctctttaaccctgccaaaatgcctgcattctcgcacgagatgctccggcgcaagatctccgtcgttgttgttggttacccggctactccgctggtctcgtcccgtgctcgtttctgtgtctctgctgcccacactaaggacgatcttgaccgtgtgttgactgcttgtgacgaaattggcaacgtccttcaattgaagttctctactggtatcgcgggcggtgcactgcctgctgccgaacagccggctcctccgcccgagctggagaaggaatggcaccgcaagcgctcggacaatatttcacctccacgctggcgcgtcgaggatgtcatccgacgcggagtccaggatgtcaagaaccccttgtactagtactagattggcttccttctcctcccggttgacatgacgctgtcttgagttcactaggctttgagatgagtcttcggtcggggtctttttccacaagcacgggttgttgctggtcacaccgtgccggagtcttaatcccatgtgtccccttgctctttgttctgagtttatatgatttttgtgactttcgctggacttggatcctaaggcacataaagcgagtgaatctcctcggactagaaagaaaagagggactcggggggaaacgaaaagatgagttattcgacagcaacgaatgaatatgccccgtctcctatgatccttcttactcttgcttcttcatgtttgcatccatacagaatttcatgttactttctttgtcgctgttatccttctcaagatattgcctaataatgttccactattgcctaatattgttccattcaatgctccacagggagaagatagctaaagaagaggatcttaaagactagaaagaccgctgaaaagactactaaagagtaccatcttcttatatgtacctttcatatgtgaatcctaacgaaaagtacatcttgcgttggaactatgttcaaaggtactaagcctattccaaaacgtcaatccggggaaggcccattcatatacttccaccacttccttcttcacttcttttcctttaaccatcttatctctctatttcccagtactcacttcgatttattgaaaacaaaatgtcttctctgaccaatccaagcctcgccaagtccttacgccaatacatgcagtcaaccttccgcattggccatggaactgtctcccctcgcagtctatacggcattcaagttcctgagttgaaagttgccttgaatgaagcctaccactataaaatcggtgcaaacgaatttgaccctgacgtcgtctttcccgaggttctcaccctcagcaaccaactctctaccatcctacaacaactcacacccgcccaagagaccaagttcgaaaaccatatcctacattgccttgctagtatggtgtacggatccaacatgatcgagcgcgccgggggcgattccgacagcacatttggcgctgtgtacggcaatcttcctcggaaaggcagtggaaggaccagaagagatcgaagaaacgaaggaagagttccagctaccgtaccacaaactgctaggagacatttccccggccttgcgcagttaccgtgaaattgcgcaacacgccagggctgcctcctacatcatcgttcaactctgcatacacgaccaagatctcagcgaagagatcattctccaggctcatagaatcttgacgtacaaagttgacgctgaaaccactccctgggaggaatacagtggtgtctatcgtacggatgaagtctccgccggcctacgtccattcccgcaccacagcatcgtgccattcaaaatgaagggaatggtccgcgacctccattctgatgttaaagaagctattgctaaaggaacactcgaccctgtcagcatagcctcgaaatacacccacgtcttcgttaatatccatcctttcatcgacggaaatggatgtatgtgtcgtttgatcttgaactctatgctcctcaagcttggcagctttcttgcgtgcatcggtgggacagaagaggaacgcattgtttacatggaaatcgccagtaacggaggtgcacttgaagatctgtatggagatcttgatgaagatgagaaacccgtaatgtataaggagctagggagtcttgttctggagtatgtcaaagagagtatgcaaaatctggttactacagtgctttcgtgaagtgtcttaagtctgattttcggtgttaatatttttgtatttctatggaggttttcctgggcatcgatggatggagtgtattaataccccttgttgctagtcaaatgtcactatttgtaaacctgtttttgtattcaaagtctggatcactaactaagtactcagttctgaatctcttgtataatcacccttctggtatcctcatctgcagactgcatgactgtttgacccctacaatcctcgatatccacactcgcacctttatgaactagataccgaataacatcacctttcttaagagccacggccgtgtgtaaaggagtttccctcataaaaggaaacatattcctcgaatattgatggtcttcatacataagggcattaaaaggagcaccccgatcaacgagcatttcgacgactttaaggctgtcagactctcgatagatcgcattatgcacaagctggcctattctaacatcaccaccacgacgtaggagaagatcaatagttgacaaagcggcgtatctggcagcataggagagcggggtattatcgatgtcacagcgcgtattaggatctgcgccatggtcgagcagccatgttgtcatctccgggtcctcgagcgcattgctagaacgagataattgttattcggctataagcttttaaaagagaataggttgtctcacgcaagaataggcgggtccgttctactcattgacgtgttgatatcccagccgttattgaagaagctggtcaagatagtcttcgctctcgccttgacggcttcgagtacgtagattggcgacacgggcattttgtgttggagtagctcgttcacgagatacactttgtttgacctgatggcatcaatcatgacctcgtagaaatgacggatatcgcaatcatcacggatggtgcgatcaaggaattctcgtaactgctgctcgctaagtcttggtagctgctgcactaacaagagcctttttgctgggatcgggggaggagtttgaactcggcttgtgtaaccctgttcaagggtgtgatgaacagacatggttgaatacttgaggtgtagagaaacataacagaaggaaagcaaagcaaaggtactgcaaagaatgatacaggaaggtcaatatcccgtgactattgtagtatcaccatggtaaaaaaaaaagcctgatcagccctgattaatacatgtaagttccataactcccgtgcaaacagaaaaacaaaatcagtattcgtcagtatcgagaggtggaaagagagctccaagagagatatctgatggtctcttaactaaattatatacgcacaaatccttcctgttttggcttaaatgtcctaagctaagcctatccagaacctatgtataactttagatatagacactaaccactgatagaactggaaacaagtgttcagtccggtcaatgcaaatggtatttctatcatgctgagcttttacgcttttatatcaggcgcccgggtcaggccagaatcaaaacaaaagaaaaaagcaagtcgggatcgttccacaagatgggagagatccttctgaatctccaaacagtaggctgtgaagtgcccaaaaaaagaaacagggagaagaagacaaagtacgacaaaaatagaggcgcaaggaaacgcctgtcagcaaaaacagagggatatcattaagattcaaagaatccagaatgtagcaaaacaacaatttgaaaagataaattgaatggggaagaagaaaacagaaaaagcaaaaccgtaggactcgtatactcgataagtcatcaaggaggaagccattccctccaccaaatatgtagaatatttctcgtcggcagccattcactcgtctttcagacttccgaccaaattgcgcagcacgtccatgataacagcttcgtcttttggctcgccgcctgggaatgagctctctggcgcatcgcccaacacgcgtgcgcgcgcactccggagaacttcccggatgtagtttttgtcctcgtagtcttccatgagaacagcttcaaagtcatcgattgccttattcgctcggtcaatgaatgaggatgactctggtggccctggtgtttgctgagcagggtgttgctgttgatggtgaggatgggccgggaggcctggaggtggatgatgctggtgttggtgttggtgttggtgttgatgctgatgctggtgctgcggctggtgctggtggtgaggtagcggatgttgctgctgaggaggatgcgacatgggctgtgactggggtggaaccggttgttgatgcgggtgcggatgctgatggtgttggaactgcaccccgccagatggagggtaggcccgaggctgcgggttattgtgagggggttgagaggatggcggcttttgttgtgaataaggggaatgatgctgaggtggtccatgaggaggccgtggggtttgcaactgttgctgctggccgccttgcggagcgggggcggatgcgtagggcgaagtgtaggttgaagggatggtcgctgcgaatgcagctgggaggttgttacggagctgactggggatggggaaggatgcagctggattgatagctggtgctggtgccggtaccggtgccgccgatactggtgctggtgcctgcgtaggtgcgggtgtcggtgcgggtgcgggtgcgggtgcggacacgggtataggagccggagtaggtgttggtgctggtggtggaataggagcagagacaggggcaggtgtaggcgccggtgggggtgcttgtgccggtaccggtgccggtgcagcagccgggggcgggggcggagcagtagcagtagcttgaaccggcgcagcaggaggagcggttggtttaggagcaggggccttcaatgcaggtgggtagggactagaccgtggtggaggtcctcctacattcacagatgccgggaaaggagcaggcggtatggaagggaattggaaatgctgtggcggatttggcaccggtggtgggccctgtggtgcataagagtaggacgcctgaggcatgtactgctgcggagtaggcgcaggaggatgggacacctgaggcggcggcgaagggcgtcgtttcttttccttttcaactgacgcgcctggaataagctgccatgaccagcccttgccatcgcgctctgcgtgcatgaacaaatgaccgttgccgttcagattgtgccgtacgctggatgtccaaccctcagtctcacacttgaagcggaagtacggatacttcagtttcagcgcacggtagatctgcttcaaggtcattggcgtgccggcttccgtcagagcatcaaatatgagaacggcgtaattgtatgggggctttgccagatcctcagtattgtaagcagactctggaggataattgggagatggtgaccgtgatggtttgcgctttttgaccggtgggggtttgacatattcttgcgcaggctctacagacaccttgccttccgttgagggaagaggagactccattggtgtaccatccggcttctttctcttggtgtacttccgcttctcggatggttttggtgactcgggaacgacagattctttggcaactgtcttcccagccttgggcactttaggtggaggtggtgtgatacctccgttggcctcacgcttggcagcatttttctgctcccgggcaagctcagctcgctcgcgcttggacataatcccatctttaggagggcgtcctggtccccgccggcgtgtcggctgtgaatcgttatccccattttcgatagaatccatcgcttgggacgatttggaatccctggtcttcaggacgatcttctttgaaggttctctgctctcgccgctatcgcttccaagtctgtcagactcatcgtcttcgtcatccacttcaatcgaagcccgagcatcttgctcttcctcctcttcttccttttctgccaatttttcttccatccggtccgctccagtttcgccaattgggacgtctggtagcaaaaatcggatgcgcacgcctccaatttggatgtaatcaccgctgtgtaacgggcgaacttgccccggcgatagccaatcagccccaatgaatgctccgttacgtcccattacttccatttcgaacaaattccgatcaaagttgtatgagatccggacatgcctccgagaaatccctcgatggcctgcggcactgccgtcaacggtcgttggggggtgaattgggatggtgggacaagaatcaggggatgggagcaaagccagcgcatcaacgggctttgcgtctccgtttccatcttgcaaagattgcattgcgagcgcattgtagtcggttgtcgattgtagttgagccgggtttgcatgtaatggtataacagcttcgtcaaaagaggatcttgaggatcgtcggctcatgttcatattgttcgggagatgcggaggtacatctggatcaaagcccatgatacctccccgatcactgacgacactgcccatcatagcagcgctttcctctcgcttcatacggttcggggtgtgtgatgtatttcctccacttgaactctttgcccgagtgcttcgtacggcctgccggtactggaactctcggtggtgcgcagcgcgggcagcgcgcacgtctcgtcctaggataaatgagtaggtattgacgtaaaaatgcccatcatcgaactccaatttggcaaatgcttgaatcttaggttccgatccagcgattgaggccgccatatcttgatatcccagggctgacaggtcggcattttgcgaaagaaaggcggctgtgagcatctcattttggtggagggcttcaaacgcatttttgggggccgcggaaaaatccaagggtggaaggagcgagggctgctctgggttcaatttcgggttcatggggtctgacaaggtctccatggcatcggttgagttgaattctgtatggttcatatcctggtgcgcggaatttccctgctcatcacctaaagctttcccattcagcaagtcctgaatctcacgggatatcgaggttgtgtctcggtgcaagctcgggtcgatgggcgtggggttctgggcagccatgtcgaatggctgggagattgagtcgtccatcttgatatctatgtgagtatcctggtgctcctcctgttttgcaggttgtaccatggtagtggagtttgcggctgattggttgccgaggagctgtgcgaggagcgcacttgcggcgctttgcgtatttacatcttgttgatgttgcgcagctgaaaagtcgtggctgtccgagcattcggtttttattgcgacgtccggggcgggcattccgttgggagttgacggggcagaattattctgcatggcgcggattgcggagtcgtctcgaggattggaagggggtgtggtgtctggtgagcagccatagtcgtatagggggctatcggggcctgggtcaggcggtcgatggcccacggctggcgcagtcatggtctgcgacgacatgacaggctgttgctgaggaagggagaggaatgaagttcctataagaagggaagttctcaacttggaaccgggcggtgagcgatggccgagttggtggctgcagatagccgtagtcaccgcagagccatgtttttttttttccttttttccttatttttcttcggctctcgaaatggcgatttgacttgcagaattcaccaacaagtatgaatctggaaaggtttacggttggagggatggagagaaaaagcgccgatgatcctcttccgggacaaattttcattcccgccccgcctaaatccatattctctccgaattgatccacctatatggattgcccgcaggtggttctcaccgattttgttgatcaaaagagcctagaactatataatgaatgtggcaatttatgaccctatgcaattgacctcattatactcctataatctcacatttcctcggtcttttctctagggtggagttgacccctctagtatggcttgcctccacgttgagatgaggggaaaccgtgctagtcgtaataggtactttaggcaaatgcaatttctatcttgtatcaagtccgtatatgcaagggtatacgatgtatagtactacacattctggggaagcggagtattacttgacacggggttaggtgtctgcgacaaacttggcaaaaaatgacagaaaactcagtgtttcttctgcttcgctcttttgctgaggcgtgcttggcgaatctaaacgaggagtagcataaggaccggcctggctgaggctgagagagttggcagaaacctcagccgctgaatggttgtcacgactctcattgtgtccctctgatatgacgccaaccaaattttgatgggttgaaagcgcatgtgagatcctgtgattcaatcatatcatatgctcacaggtagaacccgattataaaatcggcaccgacatccatgctctgtagggcttggctgttgatttctcccgtcagaggacacggcgaatcgatagtgcttgcgagattgtcagggtgcgagagtcgaataagtggaagtctaaatcgatggttaactaagggctctatataaaactagccgcaaagaataacttaactacaagaaacatcacatgaagattcatccaccactgccccgtaggtttgaagttacgtttggagtgacatgagacgacagagcatcgggctcgtcaaagcgagcgacgttcagaagaatatgtgttttgataatctcttgtcgatctatgttgtagttggtctaggacaatcatgagttagggccggagggtgggataaaaatagaatgtgacgtcacctttctgacaacaccctacctctccttcttccacttttgaatgctggaaaccgttgcagcatgacagtattttgcccctgaataattggtgggttcgctatagaaagagtgtctagaattaaggttagccgcagaccttgccaagaatagccgcagcctaaggggatcattattggctcagatccaagacccaaaatgatacgtaatcacttagcttctctagttaactattaactagttaactaactagcttttctattctataatcctctccgacatccaatctgatattatcggtagatagaggtctatagatacaaattttcctaattagcctatcccgactcctggacttttaaaactctttgtaattggagttttatactagattatataaaagactcccgtcttaacagttagcttacaatcacttcactagctttacgtcgaagcaggagtgagtgttacctgccagatctttgtagcaaaagagtgcattggaacgagattattaagtacaagaagagacaggaaagagaggagaggggaaactcggggtatacaaaatcctacccatctgggaaggaacgacctgagatagtaatctaacccccgggcaaaggtgttttagtccctaaatgctggtttttcatcgttaacctggtcattaagtatccggtcgtcctcgtagcttcaatctattcctgatccggtttttctgaaacccaagaatgatcctctaggtttacaattgggagtcatgttacgatccaacgtttgctttgctttgcttgtttgcttgttttctagatagttgagcgagatgattcgaaccttgcattgtttacaaagcggtcaggatacagctataagaactagctgtctcccactttgcaacttgcttccttcctctctctccctatcttagttattctgaattcaatgcactcttctatcttgcaagacctggcacgtcacaagttccatggttaggaaattgatgttaagtgtgggaaaatgtatcaagtgacctcgctttgacatagttaatgagaataattctctcccactatggaggttctgccggaccttgtcctccggatcccgcccgtcttggctcacatatgacacatagttaagagcctcaccctctagttactttaggcttcgatccaccttccaatcgactctcccaccctcccacccacagcaccccagcgcagctcgaatgacatcctcgttgcccggattccgcaagggcttcgaccctagaactattatcacccttgataaacccctctcttcccggtgggaaattcttgagaagctgaatgagtatgacgatcaggtatgacccctctcatcccattacagggtcctcgggaatctgaacgagcataattggtaggtcactgtggaggaaaataaggcatatggcctccgttctttcgccgaagctaaatttttatgttgtgatcctcaacgccgtgcaacgaaaacctttatgcgagtctacattcaagttccccatcgaacaactgagatggatgatgcggacaccagaggccagcaagccatgtcatagatcccgcatgaattagcttccctgctcgatctaactgaaaaggactcaaatatcacaccaaagctcctcggatacaagaccggtactcaggatcgctcagggctagttccggatgggttcatcatatggcttgcttgggaaattgttcctgggctacgccttggcgatagtgatggcgatggtccattctggggtcttgaaagctctgaaagaaagcaaatccgtgaatcccttcttaaggctcttgcgtaagttcgatattccttctctgtatatcactgaatctaattattattaatgttttagcaagctgaaggagtatgggtggtgcccgagcgtggatagggcaaaaggtctagtttggcaccgagagactcaaacactgtatgcgaaccacgttatcttagcttacttatttactgattgaatatagctacttcatcggtggcttctgcgagaccatgaaggataagcccatgcgtgtcgcctgctcaacggttcgcgacttttgaacttgctttaccggatgatccagtcagctgggaaatggaagactgggataaggatacttcacgcaggaaatggtagctaacgaggaagtaaatgttccgctcagcctcacattgatctttgcttctgagcccagggaagagagggtcggtgcggcagtcgcgcgacggagggtgagaatcacccgctctcacctggcttctcactcacccagtctcacccggacggcagcaacccgaccttctgccgcagataaaccacacaccggtgagtaagtagttaggtgggagtgcctcgctagctatgttgtacagaccatgactaggacggactttgattcgagcctctttctccaatgtccgagaagctgatcaatgaaatcctcgaatgcaaccacgagttgtatacacagcccatatgctgtaactgtcggccataatatctgagtcactgctagcagccccaacagcagctttgtttgtaggcacacccgcttttgatcatggaaggagtgtatttgatttcagtgaggtcaaaatcagaatgagatagttcccattggcgcaaccagggttgacaaagctaatattcacgtccgggttctagcttctggatcctgggggacaagaacaggctggcagctcatcacaagtgggtgggtcctgacccccgggggggggagagaggatccccgacgatccccagaaactaggctggccaccacgtgacagtgggtttgattgtaataatcaaagatcatattttcgcgataaaaaaaagccaatcagaccctttacatctacctctttctataccttcacctcacaaagaacaaagacccaaatggccccaaaacccaaatccaaaaagcccgacccaaacccgcaaccaaaaaccacaaccccaaactggccacccctccgcccactcctcccggccaccgatctaaccctgacccccgtcctcccggaccaaatctacctaatccgcaatttcctcccaggcaccctctgcaaaacctacacctcattcctcgcctcgctaccactaaccacaacaccgggcgcgcccaagaaagacgaggcattgcgcgtcaacgaccggttccagatcgacgatgcgcggttcgcggagatgttgtggagcacgacggcgctgaaggagcttgtcacgacgcgatttgacgaagacgagtccgacgaagatgacggtagtcactcgcctgctctcggtcttgctgaacgcgcgcgacaactctggggcggggagccgttggggttgaatcctaatattcgcatttatcgatactctgcaggacagtttttcggacaacattgtaagctctttcttcgttcgtttttcgtgctgcgaattccattatggaaccatacacatacatacatccaagcaagcgaaaattacacaacactcgttaattaacccaatcgcagacgacgacgccaacaatataaccctccccccaccgaactcacgctcaaaagcaacacccgcgcgcacgacctggaccctcctgatctacctgacgtcctgtacaggcggtgaaacgatcttctacccggagccgacgcgcgcgaaccgtcatccggagccgatagctgttgcgccggaggttgggatggcgctgttgcatcgacatggtgatcattgtatgattcatgagggggctgaggttactggtggggagaagtgggttttgaggagtgatttggttgttcctaggtgattgcattttggagtggcgaggttgtagaggtgtagtatttgttaggtgtggtagaatcgtagtgggcaggtcctacgcgatctcgaatccgtggtgtttggtatatagcattgcatgggaattttagttagggaattaaacagttctagtcattctgttggatcatacttagtattgggtgcaatcgactggataacacggtagcaaaaggacaatatgaacaaggacgacagtaggtccctgtcacagcacgcatgaaagagacagttgtagatacaagttaaatagtcgtaaagagtggaaagtttgctggggaaaggagatgggaggaaacaatgagaatgaaacaaagagtgagatcatcagttattgaatagcagggtgacagatgagagctggacctcgccaatggatctaattcccggaaagcctccagattcaatttcattttatcttatcaaattggtttggaaacaggagacttctccccgtccagttcatactcggctcctctcatcatcccctccacagggccgagaagccgcttgaatccgtcccggcccaaccgtgccaccttcacatccgttttagtggtgatgctcgcctggcggggcttgtcgtccagcaaggcaagctcaccaaagtaatcacctcggtgatagctcttgacgggcccagagacaccgttcttggtagcctcggcttcgcccgactccagaagatagaatgcatctccgggatcgccttcgtggatgatgatggaattagccggatacttgatagtatccagagcatcggcgatcttcgagcgctcgtatggcttcagagaagaaagcagcgggacttcctccagaaaagcctcgtacatacgacggcgttggaatgcagagtccattaagatgcggcggaatgtgacgcgatctagagcccacaaagtgctctgcggctcagtggagatcactgtcgcagcacgcggggcattgtacatcagagccaactcgccgaaagatcctccgggtccagtgctggcgaccttgttgcccaagccatcaggaccaggctgcacggcaccagaaggattgatatagacgtcgaaatttcccttctccacgatgtagaagtaatccccggcgtcgccttgggagatgaccttgatatccttcgccggaatgggcttctccaccagagcattgagcacggtcgagaatgaatcatcgtcgaggtgggagaaaaggaagttgctactgacggcgctcttgagccgggaggcctgctcttcggtctttgggtggtgaggaggcgaccaactatctgaacccgcttcagtagggtttaaagattccgctgagaccgatgtccgacgaccaagcgcgtagttggtagggaatccttgctgtgcggatcgttccgggagaggggcaagctccccctcctcctcgtcatcctcccccgcattatcctggaagggactccggctgaacaacgatctacccacttgtaatccttgtgatcctccttcagcgaatgcactacctccaaacaaagcggcgctcggcagcgcagcacccgaattaggctgtcggaaggtcaggttggttggtgacgtcacctcgaagccgtcgtcctcggaatttttttggttgccagcagaattgtcgtcaactctagtgttgacggccggggccaaatccggagcagagtttagagccatgagggcgttggattgagggccggagaggccgcaactccggggttgaagctgagagagagggacgggcgaaacagagatgagatctgtggaaattagaaaggaatgaattaaataggggagaatgaatgggatgaaaatgtaggtaatgcagattgtagaggagaggaggagaggtagaaaaggtagagagtaggaagcaacggaggggcagacagtgggggattattggttggagtctaattgtaggaatactgcatgacctcgtccctctccttttttttctctccttttcttttctctctcctttccgttctgctttcttttttctttctttctgtctcgggaaaataaaatggaatattgcagggaaaaagaaggagaaagaaaaagcaaaagcaagtcaagccaacaacaagcgaaactgaaattaccttctaaaagcaagctcagctttacttataacaagcgagtcagtttggaagacaaagggggaagacgtggaaagatgaggggtacacactaaagttggtctgagcttcgtcgatcattggatgtgcttcacctttcacgcactgtgctatgtactccatgttgtacatatttatggagtaatggtgatcgacatccattcctatactaagatgtgggatactaggtagtataagatttaatttaagcccccgtctgagcgtcttctacacgtcttctagaatggcatgctcgccactaaagtggcaatttcgggaaccttggaagtatcaccacgtcacacatgtcatggactcgtgttcaaatgtcaccttatagaacgggataaaaatacctgaacggcaaaatcaaggaaagtgtcaagagtacagacgtttcatgctctggtggggaacgagaatggatatcatataatccacggtcttcgctcaataattgtagaagcatccagcatacctctatctagctatagcttcaaatacggaaccttgacagtatggagtacttcgttctccgttgataacctaaagctctctccatggcgtcatataaacgagaaagtctagatcgggcgcatagacccagccacagccacggttcacccccagcccccttatattggcgattggccatgtcgatgtgcatgcgaagtctgaattatagagcgctaagtactgtccagggccaggtactggtctgtgtcaccccccaccgattcgaataatttacttgggcctttttccctatcttccccaaactatcttttcatttttctcttcacgttctgtgtcagaatcaatatgggtacctttacatttcactggtgagtcgcgcttctagcatgtcccattctcgagatttccatttcgaaatctctcctcctcgtacaatgctgagacggttacttgcaggccttacaatgcgagcgaggtgttcgttacaggcactttcgacgattggggtaagacggtgaaactggaccgagtcggcgacagctttgtcaaggaagtgactacactgcctgtacaaaaagtccaatacaaggtatggcctttcttttttttttcttctctcgcacactttcgcctttgccttgccctcgtagattggatggcggtgagcatttacaatgacgtcacctgggccgctttttccccccatttataaggtcgccagttcccggaatccccaaagtcccaaacattttaagattgcctgattccccgctgactcaaaaaaattcaaaagtttgtcgtcgacgggatttggactacagaccccaaagcacgtgaagaacaagacggacataacaacgtcaacaacgtgctgctgcctgaagaaattaaggcttccgactccgcccccactatgtctggcgtgaccccttactctacaaccgcggcactcgctgccaacgttcccaaggagcccaatggggatctccctggtagcttcccagaaactccgggacaggaatccgaacagaccttttccgtggatcccattccagcttcgggaggttatggtaaccccgttaccctgaagccgggcgaggaagtcccccgccagagcacattcaacaacaataccgttggctcaactgtcactttggacaaagaatcatatgacaagggtcaaactctacctgttgacggctaccaagcaaacaacaccagccctgagactttcgcatttgccccttttactctccccccaatcacgaacaatatgattcctgaatccagtcttccgatcggtggaccctctcagtcgtacaccggaggtccagcgcagcaggcagcgctagccgatccggaatacttcatccagtccagtggccccacctcgaccacagcggaactcgctgctggcgtgccgctggagtcaaagggcaaggccaacgccaacaagcccgttgatgaggtcccccgggtggtgaaagactcaattgccgaggctcacaaggaccctgaggcgactgcgtaccaagaagcagtcgacgagaagtacgctaccgagaacgagcttcacaagaagtaccccgttgaaaactccgcagggaggttcgttcaacccgttgacgaggttcctcgggttgtgaaggactcgatggccgaaggttataaggaccccgaggcggctgcaaacctgaaagcagtcgacgagaaatatgccaccgagaaggaactgcaagagaagttccctgtcgaggactctgcgggtagacagaccaacggtcactaccctatccctcgggcagtgaaggactcgatatccgaggctcacacaaacccggaggcgactacgaaccaggaggcacttgctgacaagtatgctaccgagaaggagctacagcagaagttccctattgaagagtctgcgggaaggttcgttcagcctgttgaggaggtccctcaggtcgtgaaggactcgatggccgaaggttataaggaccccgaggcggctgcaaacctgaaagcagtcgacgaaaagtctgctaccgagaaggaactgcaagagaagttccccgttgaagattccgcgggcagacagatcgacggtcactaccctgtccctcgggcagtgaaggactcgatagccgaggctcataaggacccggaggcgactacgaaccaggaggcacttggtgagaagtatgcgaccgaaaaggagctacagcagaagtaccctgttgaagagtctgcgggtagatataataagcccgttgacgaggtccctcaggtggtgaaggactcgatggccgaggctttcagggacccagaagcggctgccaaccaagaagcagttgacgagaagtatgctaccgagaaggaactgcacaagaagatccgtgttgaggagtctgcgggtgcaccggcgcctactgccactgcggccacccaggccattgcgccccatgtcactgccagtggtgtggactcgtcagatgtgtcgccactttccacacctacggcgaaccgcagctttactgctgctaccccatcttcagcgctgaagaccaccgagtccagtgggccgactgtcacaactggccccgagactacttctactgccgaaacctcgactgccggaaccacggctgccgcgactgcggatcccgcaggtcccactgtgacgacgggagttgcatctgctcaggcacctaccagctcgaccgcagagccggcagatcccgctgcgaccactggagctggatctacccagtctcctgctacttcttccaagcccgcttcgccgtctcgcagaaaatcccacagcacggaaggtgctgcttctactattggtgacaagaagaagaagcaccgcctgagtggctttttcgacaagatcaaggagaagcttaaataaatgactcggaaatgtccaatttccgaccttgggatccgttctatgattctatcatcttgggcggtatagtcttggctgtgaaagccgaccgatatcgcatgctttttctctgatgccttacgttctttgcttctggatacctctcctgccctgttttactgcattgtatttctgcaagccgctttttgtttatgactcggctagtaattatcgtctaatcgaagtaccttgcttgatgtgttgattgtttatatcgtactttatgtcttgtacttgtatctaagccgaaatcggaccaaagtcttgcgtaatatgttgtacagaactcggagtataagcatgttgattcgacatggatcatgaaacatgaggttaaagacccaatcagaatagaacctgagaactaagaaagtcgaatgtacaattctccacgtataacccttgggattgcccttgtcatgagtggggagaaggtcattccctaattccgctcttctccacctttccccgactttggggacttccaatcttctttcccttctcctcccttcttctctgcattgtacaagcgaccttggtcttgggggtatctacaccaccgcgagcacaatatggctacccccacattgtccgccatgatcgacccgacaaagcaggccgaatacccaattgtgctaggggaaaggcttgctcgaaacccaaacacgagccggctgatcaacgttaactacaaccacaaatccaagtccgccacctcacagcaacgttcggtcatcacccactcccgatcggccgacctctatgacctcgccgtgactgataaggccccgaacgccgatcaaacgttgacctattcatacaaaggcagcgaggacccgtcgggcgagcgaagcctggtactcatctttgacccggagcggaaagtctttgttctggagccggtctcgacaaccttgaactttaatctacggtcggcaccaggaaagacggaaaagcaggtccgcgagcaatacgaacaactacagataaaggaagaagatgaaccagcgaacccggtagaagaccggcacggaggaagcgccagcgaggatgaggggccggccgacgacagcaatccctatgacttccgacatttcctcccgaagaatcgccgcgaggaggacaagccgccctcgggctacagcaccccggaacttgtcaccagccgggccagcacaccgttaatgccggctgccagatccgcgccgagacccgcacctcgacccacaacgcaagcaaaccccctacgacagaagagaccgccagcaaaagcacccgccaaaacatacaagtcaagcgagccggtcatttatcccgacccgtctgagcacggggactcgcgctcgtcgccgtccgatgcaggcaccgggtcacaacaagctgggcagtctcctggctcgaatatcattgtcgatggagatctcattattgatatgggatctccacctccgcgtccgctcgtggaccggacttacttctcgtcgaataatacaccggcagatgacgatggcgacgaagacgttggggagtttagtctgccctccccggtcggcaatacagctccactttcctcagggcacacagacacggctgcccaagaggacgaaatggaagatgatgatgctttggcggcagagatggaagccgcctttgagcaaagtgctcgtgaagaggaggctcggaacaaccagtacagtcagccaacgaccaggcaatatatccccagtgatgatgagagcgaggtcagcgaggaggagtaaatgtttggctttcttgtttattgcatctaccagcgtggcgccaggacggactttgattccaacgtactagataccaattgtaattgtagtatatttgacctttccactagttcagaatcgctgttctatttagtgcattgttctacgcatcttcgcatcttccaactcatgacataccaaagttcaatggcttcatccccctatccaggagggcaacacaaagatcgttgtttttccattcactagtaatttgggggtgtgcaaatagtaattctcctataaagtgtgcattgtcatctcttacatcggataaatagttccttcggataaaccattgttccgaccaaaagcttcccttgtcgactgcgtcaatacggagatctttgccgctttttaagttacctagtagtgctcaatatctcggcagcactctgttgtttatattgcttatatattggttatccctgaattcccttctccaattctctgaacatctcccgcggtgcactatcatatccgcgatgcgatagaaagctccgccgagctagctttggcttacgactgtgacgtttgtaacgataacgactattgtgaaccacccgcgcaagctgttccttatcgcgcgctggatgcgctttgcctcggtcgccattgtgtgaacaacccctcgatcttattctctttcccctcttcacacagcggccagccatggcttcctcagcaccgaagcgacgaatccccggcctgccgaacccggtgttggaagcggagcagcaaaaatggctattcaccgaggaagaattcgaccgtacaccatcgcgcattgataagatcgagcgtgggaaagaggactacatccgccaccgtgcagtcgacttcatttggcaagtgagcgtgatgttgaagatgcccccgcagacctcaatgaccgccacggtgtacatgcatcgcttcctcatgcgctattcgttgatgggccaatatccggagatggggtcggacctgatgcacccgaaggtgatcgctgcggtggccctgttcgtcgcgttcaaggtcgacgaggccatgcgccgcatgaaagactttgtcatcgcatgctgccgggtcgccatgaagcagccgaacctgattgtcgacgagcagtccaaggattactggaaatggcgagacctgatcctgcagaacgagagcgtcatgcttgaatacctctgctttgacctacaggtcgagtccccttaccgcattctctgggactactccatcttcctaggcgtcagcgacaacaggactttgcgccactccacctactcctttctcaacgactctacctacaccgtcctctgtctccaatttccaccccgcgtcatcgccgccgcagccctgtacgccgctgcccgccactgcaaagtcgccttccccgacgacgccgaaggccggccctggtgggagcagatcgacgtccgcctcgacgacctcatccgcgcctgcaccttcatcgtgaagatctacgagcgagtccagcaaagcctcagcaagggcttcccggatttcgcgcttccagactcaaccccccaacctaacgacccaacccgcatcttcgacaccgatcccacaaaatccgcctccgagcagcaatccatctccacccctcctaccctcaccgtcacctcagacacggcttcaaacggccgcaagcgctcgcgcgaacccgaacctcaccccaccacacagtcacaaccacacccaccctccccaaaaaacaaacccccttcaaccctcacccttaacgggaacgggaacggcgaccgcgatcgatcgcccaagcgccagcggaccatcactccctccaatgaagccgtcctccccacccaccaaaagcaaaaccctcccgccccctccaactcgcgcgtccccgcggcagcattatctcaaacaaaagccacgcctcaattcaaatccatgtcagtcgccgaagggaaaccggaaccaggaccggggtcctcctcaaaaccccctccgaaagaagagtccagcattgacgtcgaagaaggcgaactccatgaaaaacaacatgtcgttccagtcgcgcatcccactccggcggatgtggattctgattctcggagtaaactagactcccggaaagaggagaaagaggagggcgaggctgatgatgatgatcgtgctgggagtgaagaaggcgagatctaggagtttgggcttctcaggtcctgtggatatgatagtgggaggatatcgacatccacattgtttttgcttgtttaccaactttgtacttatgtcctgtgtcctgatttattaggtgtagacaaaatatcttatgaatagttctagttaatgtcagaagaagacgtacgattcaatcctagtttccaagtccaagtccatagccagacccaggtctatatattcgtagctatgctaaaaaaaaaaggcactagctacagtcaactatctacctaactaaagcgaatgattacagacaaacatcttcagtgtcgcgcggggaaaaagaaaaaaaaaagaaagaaaggcccagccgtgatttgaacacgggaatctccgcattacaagtgcgacgcgttaaccactgcgctactaggcctgcggtgactgattattttgtataccatttcttctagccattttgtttcttttctcccagacagaaaaaaagagaaggcccagccgtgaatcgaacacgggaatctccgcattacaagtgcgacgcgttaaccactgcgctactaggccggtcaaggttactgaattttattttagagacgttataaactaaccgcttttaaccccgttacgttcactattgtaaatctctctcttatgtgaggtgtacaattatcagctagactgggtctacgtctgtcatttcgggggaacttggtgaatgggatgcagtgtttgacggtaactgaaatcaaaaatatcaagcagctttggactacaacaatctcaaaccaaatttacctgttgattactaacaaacattccatcttttttagttactcaatgatcaaaagcggcaagaggtgagcaccaaagcagaaaggggaggtattaactatccggtacatatgacagagaacgtttcatacacagtttccgttaattgattttaaattcaatgtggtagatatattaatgaagccgcttggtaaatatcggactccgcatccttcgtacccaacaggcaaatttggacgcaacaaaacgaacacaaaaataaataaacagaaccaagacaaacaaataacaaaaagccaacttttgaatgtagatcggttcgatctcaaacgggaattgcaaggtgctcgtgatgaaaagagacaaggtcatcactagcctcagcctggccggacccgaacgactgcagattccatttctcaacaccctccacgcctttcagatcattcgcaaatgtactaaagaggtcacgattaagccgttcgtactcggagtattccttgggccaatttccaaggcgttcaaccgcaagtttgagcatatgcaaatgctgtcggacatgcttcccttcttccatgttttcgtctggactggaggcggacgaaggggatgagatgcccgagatgacatccatgtccacatcgctggcaggtgccgaggacgggtcaatgaacacacgcaaggcattctcgtgcagcgcggctgctttgcgatagtactggtaggccagcttacgccgactcttctgggtttgatagccttgagccacgcttgtatacatctgtgatagtagaatagtcatctcaaccgtacttggatgtcggggtccatggacacgagcacagttgtagacaagatcctccgcaagccggacagctccactataatcgctgatgagatagcgggtaatgaccaacatacgcccgagcgcaagcgtatatgaatgccgtggttgtgacaaagcataggcgtcacggctattccagagggaggtgagaacccaggccatggtgtgataatcctgttgctcatctagaaccttgatcaagcgattgatgtgttccagatccaggtgtgcgagctcaaagttgtgctccttgaaatattcgagagtatcacgaagaatcgtcgctgacacgcttagcatgtacttatcggccgagcctgctgggtgtatgtcattgtcttggccggccaggagaaggcccagcttgaacactagcttgagtgtcgcatcggacgagtagccatggtgagcaccgatgtatttcgtcgctgccaatgcgatgtggcaggcagattggtaatctttggagcgaagcagctggtctacgcgattgtaactggcgatggccactgaacgcataaagtcacgcgaggaatgagtgctgaaatattccagaactgtctcaataaaagccttagcctggttagggccgatttccaggttggaaccctctgtcgccaagaagaagctggtataccgatctgccacctgagtggcagtggatggacggccgcgattaagtaagaagccatgcaggcgggccgcggtttccgccgtgtcttgaagcttgccagtcttggagctgagggtttcccggaactgttcaaagtatatatactccgtggtgagggcggcatatatttcgttcaaggtagtagagttgtccccgcattcccggatgctatattcgaactgagcaaggaaagcaagggttgaccgcccttttgagctccggtcaaagccgagagcactctcatccttggtgtccttggtaataacatgacgatatatctcgtttgagagttgctcggccttttgaatttgaccagctgcgatatagccagatgcaatactcttggccgccgcaatcaacttgatagagagcgtctcggtcgatagcacttgcattgctgcttcctgtagcagcgaaacagctgcctgtgccttcccttgtttagtgtagagtgagactacctcccccatctgagatagggcttcctcgtgggcccatccatagctggatcgaatcgacgcgagtcgttgggtatgaatagacaacgtcttctgtagctcctttgttgacatgttctcaacctttaaagtagtgaaggctgcactctgctgctcgtggattgcatccaaggtggcacggatgtcttgatagtcgatttcaacttcactggatttaatttgcaaaagctcttcgtagagttggaccgcttccgcttcgaactgctcggactcttggcagatatttgccaatgtgttggttgcctgtatggtgatcgacgcgctcgcaccgaagagagtaatgcacgatttacgatattgcactgtcacatcatgaatggtggtagtgtcactgtgtgtcatttgcagacaatgaacataacgttgatagatggtctggacaaatcccggatcccgcaatttttggctgatctgggggctctgcaaggtagtgaacaacatccggcagggtttcagtgcgtccgcgtatcgattttgcttcaagagctccgtcgccacgataacaagtggctcgaaggcatccggaggacaggtttcccagcccttgcttaggacttgaactatctggcgataataatccactgcgatgggttgcggggccgtcagctcggccagggtccagagctgtcgtatcacagtgggatgctccccgccgaaccgcttagtataatcatccagcatatcctggtggatgttcacgacttttccggtctgggaagtacgctcgtatagacgaagaagattcaatgtggctcgctccacagtttgctcgccgcacactggccgatcgcgtcggactgcactataaagccgggtccggatatcctcttccttgaccgggtgacggcggtagcggtagcacccagcgaggcgctctgcaaaatcaacgcagtgctcaacattagttgatggcaggacgaccttttcgatcgaagccgcaaacaacgacggccacatatctcgaaggactcgtttcaacacccttgtagcatcatgccaccggtgttgagacaagtacatttcgattagcgctgtgctcgctgttgcgaaattttgctcgtcactggatgaactagtataaaccatttctttcagggttgactcggtcagcagagattttgcagatgacgagtgcatcagttgccgggaagtggactggatatttctttccacttctttgcgggtggcactctggctgctagtactttgtgcgcagtatttgaacacttccaaggccaacacagacagtcccacttccttcatgaactgagcaagctcaagcaactcggacaccaaggcttcggcactggaggtggttttctcatactcctcccaaaccccggcaaggatcgaggccgcttcgttatctctcttccgacttttgaggaatttggaatactcgaggacagtccgcagaactgacaccttgtgctcagtggagtgactgagccggtatgcctggctggtttgctgccatagctcaaggtatgtccgttcggcgtccgagaagtgaccctctgccctctgtcgctccgctttcgtcaggatggtcttcaaatcaaatgaatttgtaatcaactcgtccacctctattccagtcaaatccaggggggtgcttgtctctggcatcgtgtgtttggggccgtggaggtggactagtaatgactcgtccatctgcacagatccgctccgctggtgcgtactgttgacgaaggacctctccaaattttcattaatctcctgtactttgcggtactccttgaccagactataatgctcagacagctgcgtcaacgtggatttgaccacactacttgtcgctccgtggtggaccttctggcattcaaccagcatctggagaatctggatgcgccgtgtcatgacttccgtgacagagtcaatcattttatccacggtggcatccaggaagaactgagccatctgcatagtgatgagattccgtacagacaagaccttctggcagattgttgccgcctcatagaagatccgactactctcggcaggcacgctgttgctaatctgtcggaaaaatagcgcctggcagattacggcctgtacagtggctggatggttgttgctcaatatttggcggtacagggatgtctgaacctcatgaatggaccgaagcaacgaagtcgccttgcttgcccacaaagtcatctccaggagtggcacagagggggtcgcagggagaacagatcggaaactcttgcttgcgatattgatttcttggttgttcgtgcatttgaatgcaatcttcgcatagcctgtccagtaacgaagcgcaaaatccaataagggatgtttcctcaacaagtcttccgtcacctgcccattcagcggctccaaggatggcccatggctatcagtcacagtttgctttgcgtacagtaggagtctctgtgcaaaatccacatgcctgtccttgatcgcgggtagaaatttgcccttcgagaatacatcgaggatagcggtccgcaccagtgcgtgtctaagatagacaaggtttttgtggaagaaaaccaaggaagcgaccggcttcaatagctgagggaagtcaatttcgcgatgctcggcgagggccgcctcgtcaggcttggtggagagaagagcagccagttcctgctgggcgaggggacggttcgcagtgactagccagaccaaaatcttcttcgtatcctcgcttagcttggactgtaaggtgtgggatatcagatccgagatcttatgtcctgcctggacgatattttccaccgacttggaaagcgcggcctcgttcggcgggttctcatcgcgcacacgcttggccgccagcttcgcccaaaggaaagagccatccgatgcttccacaatccgagcaacggtcacctccttgtcttcgttggacattttgctatacacatggctctgttgaagggttttgcgggtcaccgcgctaatgtcatcgaagattaagcctagggtgactcgcactaccatttgggaggtgaccgagtccactgggtgggagccgagtgtgatcaactttaaactgggggacttggatgccgcttcatgaagccggtgtgacagggccttctccccacagctggcctcgtccacgccgtcgacgactaggactagctctctggaacctgctccactagtcttgagagcacggcccagggcatcccataggagattttcatacaactcttcgtccacagtcaaccggctctggttgtaagcctccgccaagatttgatatagctgcatgttgccaatgcgcttgctcaacatctgcgacatgatcgtcttggcgacggctcccggggtggtattggcagggattcgaccatctatctcggctcgttagagagtaaaagttttgggttgaggacaatgaaactaaccgatagatgccaatatggacatataccttgttcctcctacgggatactgcagataatcattgatcacagttgacaaaaccgtcttgccggaacccgacttagaggtgatagaaaggacctgtttttcgcctttcaagaatcgcatcaggtatggcttcacccacgtgcaagtggcctcctcgcgctcctggcccgagggggccgtggcttcggtgatatgggcaaccactgggtcttcgggctgcaaccagtctttcagggtattgattccgacggctagatttatataataagtatagatcacatggctttgggggagcgagtctacctttatctccctcgaggccctctcggatcaattgatgacgccacataaggtctgaaatgtgctcacaacgaccacgaaaactgtcaatcggacctgggaaggtactatagatatcaatcgatacccattccgaggcaaggagtgaccgatgaaagtgcgtggccacacagacgacgagagtaaccagatcagctaacgcaagaatgagctggtctttgatatctgaagagaccacaaagagctctgcacgatcgagcaggttgcctagaccagaagagcagcgatagaaaaatccaaataggtccataagggccggagcattttcctcgcccaactgtacgcttgtggtcagtcaatccgatttagtgggcacgaggatgtggcttctgctcacctcaagcaagctcgcacagtatccataggataactgggcggcgaggtggctgtcgccggcaaattgttcaatcgctaaatcaaacgaatgcacacgctcaatgaacagggccgcccacacaagggcattgtcgtagccactcccctcgggcggtaactttctcatcctctcgcaccgaatccactccaacaggctagcatagtcagtatcggacacccgagaggccgataggtcatcgctgccccgacgcgcaagcgagttgactacatctgcgagtgtggtgttcttagtggtttgctggtattgatgactgaaactcttctccctggctacggtcgcgtgctgctctgccatgttcgaagtgggtcgcagaccgagtagcgaagtggaggacaaagatatgccatggggcactgaagccatgtctgtgtgcatcaaatatgatagaaattatgataataattaggctcggttggatcctaaggaagacattatatgtcccggtttagggaggaagctcctcttccttgtactcttgttctctccccctctctcccatgatgctgtactgctgtaccatgttgtgattgtgctgcaaagtccaagacgtcaatataagctccaaccgatcataatcgcagagccaaaacaagagtacagcatgtctatggagatagtatctattttcgccactaataatggcatcatttagttcccgccgtggtctctgtatggatcagatcactcggtgcctttcgtgtaatgaaatcataaacaggcaagaaaacaagcagaacaggtatgtagccgaaccctcaaggggttaaggtttccgggccgatcctagcaaaaccaaatgtgtcattgcattcgctgagaacggttcttccacggttattgctagacggttgcaattgataacataagaacaaccatggatccatctacgggtgtgatgtaggatagatgcggggaagctgcgcacttttcagaaccagatccatcggcatctccatgggccttgcgccgccaaatctaaatcattaactaccagggattgtatgtcgtaggtttaagatggcacacaattaaataaaaatgaggtgaagatgacgctgtagtgggccacaacccaacccagatagcccaatttgaatgaaatgactttagtcgaaacatggaattgccgcactatatctcccttgtggccttccaaaccccggacactaagagtcccacggggaattaaggttgcattgatatgcggggacggcattcatctgtccccacatcccgctctgccgctatgatctcattctcattatctacatctcgggacagatgctgaataaccatgggaccgtcccaaaaatagttgtcaaccagacgatcattaggattccgccgcggttcgcttgattgtgacttctagtacttccgcgtcttgaggcaagtcggccccatcgtcattgttgtcgaaatataatctccacagatcctggctattctccacaccaaccacctcagatatcttctcgtcgtccggaacccgcacggccagccaaccttcccagccctctagtgtgatccgctcttcatcttgtgtccaatcgaaagggccacatatgtttccttcgctatcctgtttccctccccatcgtagctcatgggtctgcaaatcaacataaacccaacgtagagttggaggcgtttcgcctgtgatggtcacaaaccccgatgtgttatcaggggggaaatccggatgttggtagaaggaaccatttagtgggacaagctgtgaatcggtagatttggtgatgtacatctagattgtggtcagtgataggcagactcgatttcggccagcgcatatgcaagggataataaaatataaatcaatcggtcgtatgggaactgacgtgcctttttatccgcgcccaagtatactctcgcattatgaattgccaggctttggggcagtaatccatttgagggcatgcattggactgaaaggtaacagcgctcttgacgcgcactttcccgcctgcgctcttcatggtcccgcgtacccttggaagcctcgttgactccaatgatggttgggaccatcgcggtcatcaggaaaatgccaaataccatcttagttcaaggtattatgcagtggcttcgtttagtatgaacattggttgtactcgtaagttgtttctggcctttcgacgaagtttccagcaatgtactctagctagctatgccttgcacatactgtggcaagatggcttctaaagccgtcgatctatttgacgtaaggaagaattgatcaaagtttatcttttttgattcatagcggcaacaattcccgctaccctacaccaggacctagtcgtcaacgagaggttaaggttctcattctgcaaacggctgattgtgtcctaggagttgaagaaaccatggatatgtgaccatatcatgctttcaatatctctagggttcagaaaattagttcatagactaatactgatgagtgtcattgactctctgccttcttaccatgaagggtaccatgaggagatatatatcgcaggggctttctcctcaaaaaattactacgcaagtaataatcaagaacaattattactacagcctaagcagtaagttttatgctcaaaatattcaaccttttaacgcatggttcaacaacgaatttcgaatttctgatgtttttctccagttcttaccctgtggaagcaaattacgagaaaatatgggagaccctgtcccagcgttaaggtatatcaaatcccagtttatactttataccctcatactactattttctatgcaacaacaccctcgtttaccggtcccggaggctaaccaggcattcaaacggtgcagtgccgcccctgcccttggtaaaggaaagcgtaggggccgcgagggatcagaaacctcatcttcgaccaatgacccaattgaggatctggtggaacctgacactctggctaatggaattcccctgattggacctggcgccgcccgtgaacttgacagaagaagaaaagatgacaacgaagtgaagaaggacaatgataagggtagcctgaacatcaaaatccacctggacttgcatgccaaggtgaagttggatttggaggctgacatatatggagatattgtgattgggctactgtgatggagagcgttgcgggttgttgttacttatcaatgcgttagttaattacatggtggatataccgccactaggcaatttcaactgtgaatctcgatcacaggacttcttccataatctttgatcgtactttttaagaaggaaagccacaacgaaggtgggcgtctatgtttatcctcttgctagtttgactgtgaagtgcaatatgtatgatcctataaatgcctgattctacaggcttgtttgctagtttgcttgctagctccagcaacctaaagaccgccgaagagaactcaaatataggaagagctctgcaagctcggctacaacggcagtgcatcagtgaggcatgatttaaatcctctaagtgcacatttcgggctatatatcgaaacaattggtcgcttggttggtagaagttggcgaactgtgagttggagtaagttattacagatagggcattcggatatgagaagagaaatgtatgtagtgaagaggggaccctgccacaggggacaggggcaccgacagccttgtctgcaaaacaggtgtgagagcagagacgacgagcgcaacgatcggtaacttaccgcgtataattgcggagcgaagcaaagcaattaaatcataacctcgtgtgcattccacgtgaccaggtcttttcattggttttaatgcggtgaagaagtagccggctaactttggcagaataacccaaccggcagaataaatagctagggagtggtcaaataccaccaagacctttttaggatatgccatggagcatttttagtctagcggtattgacaaagcaacgctgaaaagggggcttcccttctcgaactcaagttattgaactagacctgcaacacgatatacatactttatcctgcaaaatggtaacatctaacaaatcctgtgactggtgctcgacagataggacaggtctctggtgatttgagatttcctgcgcataaatcgcagaccatatgtccacatagaattgtcacccagcggtctggctgcatatgatgatgtatcgaccacttcaatacctaggtgattgaattaccttggaagagggacttttggcggcgattgggcaagaaaagatcacttccaaatggcgtacaaagcttgatctcacccggggctctttcttggattcttccctttacgtgaatcacaggctcacacaacaccaatcagccatcccgacggtaccgagtaccacttcaaatctccacgatggcgtcccaacacattcgggtagccacgccgccctccagagacgccatcctcgaatccctcgtcgaaaatgtccgcgccttcaatgcgcgtctaccgccaggacgcgacaagatcgtctttggcgcgtgcgagctcgaggcggaatgccgctgcttctcaaccggcctggcgcgcccctcccgtgtagggagcagcccgccgagtttgagaccgtcaacggccacttttcagcccaaatgcacgctttcttcaacgcactgcacgacctcgaggacatggcagacaaaccgtcctcggacgacctagacctctgccgcccagacgaatgccttcggcccgtcatatgcgtttctaaccagtccgaaccctatctagactgcttgcaccgcaccttctacactcgctgtcttaccgtccagaacccggacagcctgccctgcctcaaacgcgtcactcacgctcaactgcgcatcctccccgaccgggatcctacctttcacctaatcaacatacggcctgtctccttacgtatacctctcgacctcgctacctacctccctcaactccgcgagctggcctgcccctggctataggagtgccttcccgttgcccttatatctaaggtactgtgtataatttcccgtgtctgggtaagtccttggcgcgatgaccgcgctgagtttgcgtgggctatacgttatactatacccttatggccgtcctcccttactaaggtctatctctggttctggagacctagctcctattagcacgaggtagactaagtaacgtagatacctaaccttactggtatattatcattgtcctcgactaacgagtttaaaggtatgaaccttatgtctcttagcgtttgcctcgtctctgcaacgggaaaatatgcccgccctttgagacgctgagctatttacgtggcttaggtggcggccctccaaggagagggcgaaggagtatgaagggagtgataacgtgcctccaacttcgtatgaggaggagatggttatgcgatggggggtgagatacgaggcgcctgccgttggaggagatgggaaggggaaagtgacatggcaggtcggtgaggactggaggccggaggacggagtcatcaaggcgtttgaggaccttgtggggggagacggggagaacatggagtggaaagcgtttgagtctttggaagaaagggagcaggatccggaggactgttaggaaagaatctcagccattcaacccaaatgacccccctccctcgaatcgtccattctaccgacattttcgatcggcactcgcggtcagagaatcgtgagttcgatccgagcctccctattagcgcctcaacaagagagaacttcggttctcaaacagataagtctcagaccgtggattcaaatatcctccggcatgaacgaacagccagcgatggggacgatctgtgcgactctaatagcccataaggaagggagaatatccgttaccaggtcaaaaatttcccgacaaatagtatcgtccgccccctttgttcaaataaacacaaacaaggaccagcaggcttagagatcatccaatacaatccaaactatatatgcagtgcatcagggagaagaacatatggaggggagacgcgagatagatggctatctaaactggaacaattccttgcgaaaatcccgtctctagaaagttggacttatgatcaagggctgtctcgtgatcaagttttgggtctgagatgcagaaaagtacttggaatagcggatcatactcatacatcgatttgtcaggacacggaagcctggtcacgacgacttgaaggggatagcattattccagttttgcaccatgatcgcgatctcactatgaatatgagcgaacaagaagagagctatcacaaagttgcatgctttccagagctcatctttatgtcattgtgtgcggctgcgtcccagacaagtgagaatacagccagtgtttacgaagcgatgcgcttatacaagaacacaaatcctcgggaaaagcactcgaagaagcttatacgtggcgcaatttgggcaaatcgctcgatcttcgctttagcagagactacatggggcccggagtgctcgaatgcattcttatttggcaagtataatatttcagatttggcttttatgcaagagctaatcgcttcaagccggagaatctgtctcctcctttgcccgatacgcggagtatgtcaaaaagcggcaagaggtgagcactaaaacggaaagagaaaggtctcgagtgccaggcattatccggtacatatgcgtatgcgtgtgtttaattaacgagaaggaagaaaactccaagcagatttgcgatgaaaaggacaactggttttgatcaggtgatactgttttgtatggcttcaaatgttcagaccaagacaagcaactggacagaaaacgataccgagccatgggtgatatatgaaaaaagcagcacgccgggacaccttgatgcgaatatgttcgttctcttcgttctcttcgttctcttcattcttctcggttctcctagtcaaatcctcaagctcggttcaatagccagcagtcataacccccatcccatgatccagcaagctgctcgaagcaacatagctaaacccaccgaaaggattactctcagcagcgaagtcgtcgtcatccgcgccctttccagctgggaaatcctgtcccttactatagtactcatcaaagccgccggcagtgaccgtcgggctaagcgggagatgggtgaaatcagcggagaagttctcggcgagtgcggggtccgtgacgataggctggataggcgggtcgagctcgcggcgctcaagagcagcccagtcgattttgcggaagaagcggtgcttcttgattatctgcaggtccttctgcatgtggtagccgaggcgcttggagggttctttgcggagtagacgggtaagaaggtcctttgcgtcgggccccaggaagtaggggagcgtgagcttttgtttgacaatcttctcttgtaactttgcgtggttgtttccgcggaacggaggtgagccggtgaggaggtcgtagcccagtgcgccgagggaccaccagtcgcatgcttttccgtacggcttgccttggatcacttctggcgccatgtagtcgattgtgccgaggagagagttgcagcggtcgtcgtcgctaagcgcgatcttgctgagcccgaaatcggttaggaggaggtggccttgcgagtctaggaggcagttctcgggcttcaggtcgcggtagagaacgccgacgttctggtgtaggtgtgctagtgcaagtaccatctctgccatatagaaggctgccgtatcttcttcgaacatgcgttccatggctaggtggtggaagagttcgccgccttgcgcgtactccaggatcaagtaaagcttctcgtggtcttggaatgcatagaatagcttgacgacaaaggggtggcggttgacactttccaggattgtgcgctccgtcttggtctgctcgactagctttttgtgaacagtgagggaggccttccggaattgtttctgagcgtagagcttgcccgtgacgacgtggcgcaccagtaacacagttccgaatgagcccttgcctagacaaaggagaggcacaaagtcctccgctgtcatcttgcggcacagttgactacgcaactccgcagtcatacctgggacatccgccttgcgatcgtccagtatctctggttgaacagcgtcggaactaacaaagtcctgatccagagggatttcatagctagtcaagatttcagtgtggtcgctatcggagtaaaaactggcaacactgggggtcttggagacaagtccgcccaggccagctgtgtcgtcagacagactcaaagtgttaagttgaagcttcaacgcgctgaccccatggcctgtggatgcctgtatcagtgggctagcgccgccaagcgcagttggagggcaagagggagcacgtgagctcgcggcggaaaagtccgattcctcgtcgccggatgccagaggggtgaaaccgcgaacagttgcgcacgccggcccgaattggttcttcttcttcttccgtttttgcttcggcaacatgttctcattgagagtctggtttgtatatccattgaatcccttggttgtctgctctggaggtgatatgcccatgtgtgcattatggcgacggtgattggctgggatgtcaatggcggactgttcgctgtcggcttgcggagcgaacacgtccccgaccgaccagtcgtcagaaggcattatgcttttgctataatagctccgcgagggaagcgaaataatttaggcgaaagcgccggcaataaccgcagggtcaataattgaccttgcgcggttgtaaagaacggtagcaaggtattcagaatacctattttgcagtcgctgttcacatagagaaacccggttagcctcgatcgtctcaatcttagatatcaactgtaaagaatgaatagacgggtgggtgagggttttcacgcccccactaattatcgccaaggtaaaagtaaaaataacaaaaataaaataaaatcggaaatgaaaggccgatcaaggagacgtacttcaacttgcggaatttattcaccaaagcacggttttgcttcaatgtccgaactagtcaatagaccagcctcgaatctctcgagcaggtttaccgtccgcccttcttcaggacggacctaggacccctagccaagtcacctcgctggccgaaaagtcgaaggccaaggtgaaagcagaaagcgctgggtttgtcgcgttcgagatgtcaggaggcgagtttagaagggatggatatagatcaaggttggctagggagccagtaagcgaaatcaaagcgagcgaagacgaaggtacagataggcacatagaggacgaggattttggtaaatagagattaacagtctttcttccccgggaagtgaaacaaagcaagaaaagagcgagatcgtgcagaaattcggatttcgcgcagatccgggggctaagcgactagtcccaatttggatttcacgtgtcagatgctgacattagcatgatcttattggatttatatgttggtattgtcttgatatgtcttgatattacagtctttttactttgactagccctcgatatcttgccaagtgagacaagcctcaatattacagccaccaactcgcatgactgtcgatctcgcatgactgtcgatctgcatactgcagcctcctgtgtaacatgaaccccttcacagccctaacggctattgaagaaatccttcgagcgagtaatctccacaccagaccgctggacaaaagcaagagcacttggcttttccaccttaaccgtcacatgctcattgccaaagtcgacagtcacaatgcgagcaatgaaagtggccaaagactccacagactggaaatcagtctgatcaaccttctataatatcaaaatatgtcagcaaataagaccccagaaaaatataccaacaaatgcccagagagatagaaccatacctcagccacagcccgcgtcacagcctggtaagtatcaacaacagccgacccccaagcaagctgcccaggaccctggaacgtaagaccaacaaccacagcctgtttctccagcctctcatgaggattcacaccgaggatagcatagcacctaataccctcgatgcggaactcctcctcgagaaccaccaaatcgcgcgcctccccaccagcaccctccttcccgagcgcaataaccccccgataccggagcccctcatccgcgcgcaacaaagccttaggcaaatgcagcagcacttcgcactccccatacgccgccgagatagggttcggctgcttctccgccgtagcagccgacgtcgtctccaacagacctagtccggcgtccgcgacaacgcccgcgaccacgcgcagatcctggcctaggccgcggctatgcatgtcctcacggcgcgtcccctccagactgatcaatcgctgcgacgggtgcgatgcggacgaggtgtttacgcccatgttgcgcacgtcgctttctagtcggcggaagagcttgccatagtcgagggttagggagacgttgtcggtttccgcggctgtgattattgaggagtaggagagcttgagggttgcagtgcagggttgtgattttccctggcggtgccaggcttctggggcacaggggagggggagctcgatgtcgcggagacggacgctgtcgagcacatctgggcggggtgggagttggatgggtcggtcggtcatgattgtatttgtcttggtggtttaaggaggagatggttaatgcgaaattatcaacaatattaattagatcaagggaaactgagaggggaggtttttttttggcggggcacccgtggatggttgtagatcatgacggtagaatccacacgggcatttccgttttatttgtcgcagaatcatagattagatggagactatcggtagtattatgggatattgtttgtatttttgttcactacacgtgctagaattggtttggtggagattgtgataatatatatctggtaatatatatctgggtttaacatggctccgtacccaaatttagatactaggacgttacgaatcgagaacccggaatattacaacaggagaaaccaaccaactaaaggaaaagattaagattttcggatgctaacacacatacgatagtccggggctaacaagacagaccaatagcgataaccgcctagcctccagccaccctaaagctaccagggaagaaagaaaagattgagcactcgcgctgtccagtcgtcaggaagaaagaaaagcacccggccgcaagaacgctgaacggaacctcggcaggtgaaaaagaatcatgacaccatgaaatcagtacgagacgttgcgggtatttggcgaaggaggtcaacaaaaaaatgatggtagaacggaagaatatgcaataaatccaatcaacgaagacccggcgccatctaccagtagcgaggacggtcgtaaggcacatactcgcctcttggtggagagcgaggacgaccataaccccgggcagctaggtagggatcatcatagtggcgagggggtgggggaggccgggcctcgtaggggtcttcgtagggacgacgtgggggtgggtagtcttccatccgagggcgagggggagtccggcgggcatagccatcccgttcatagtagggatcgcggcggataggaatcggcgaccgctcacggtagtgctcccgcggactgtagccacgtgggggagggatccggcggtcgtactcctccatgggggcagggtaggggcgacgtggtggggaacgggaccggtatgggtcacgaacggggcgttcctcaaagttctgaatctgggatttggtgagagggggttcctctaggtccgagccaggttggacgcttacatcggcgacacaagatacgacggagcccttgaactctcgctggtccagtttctccacggcggtcttcaggtcgttggcggtttcaaattccacaaaccttgttcaaatgtcaatggattggaagggtctcggaatacaatggttcacccaccctctgccctgttctcggccagtttcagagtaaacaacgtccagtccagactggcgggcgaagtctttcaagtcctattgaatgcatggtgagtccaggtccaggaaaggtatgtccggtaaatgtggtgagagaaaatgtaagcactcccatgtccagtccgagggggtgtatccagaatggccatcttatatatccaaaagtcccaagaaaggttccatgggtctgacaaggtgtggtgagtatgcaaggattaaggagcaattcttaaatctcaaggtaaaagaaaaagctatagaagcatttctcggttatcaagagaggaatgataatggattagtactcgatccttggctcaaccgatggccacaaggacaatggactggaagcatgtgtgggctgaatagagacgggtttgaggaatatacgtcaggaactccgggaaggaatggacttgctgctaacctgccaacttgtttctggaagaccggaaatctgcatgcggaacatagtgcgacgtggacgagggagcgcgttgcggtcaggcggtcccgggaaggcttccttgcgacgaggcccgcgcgcaaactgaacggtgagtcgctcgcctttgaagtcactgccgtctgtagtatggataagcgaggggtcattgggtggaaagtcatgggggggggcatacggaaggctataagaaaataatgttagcgactttgcgcgatgaagggaatctgataagccattcttaccgggcacaatatctctggcatccagctggtcgtcgtattcgatgaagccgaaaccgttcatcaatttgatctccgtaatcttaccggagccatggctgctgaaatgttcctcgatgtcgcttttggtcactgtgataataaagcagaaagaggttagcgcatcatttctccaaagtgactccaaaagcaccggttaggtggccacccgaggcgctgttccatgtgggtagcattccacatgagcatacgagaggtcagagcacatgggactcagaggatcagcgaagcgaccagattatgcacggtggtgcgtgtgttctccaaaactcagggaagagggacagtcaggtaccagcataccattgcggggaagattcccaagataaaggcgggttgaggatacctcagtcatggctagtctgaagcgattgatgagcgaggatagaagggaacctggctaaggcgaatcctagagaatatggatgagatcgaaaaggcgggagagcagagagaagttgtcagttgcggtctcgctgcaggaaagcgtgtaacgtgtaacccgacaaacgagagacgggtagagggtagatgtactgctgcaaagtcaaacggctgaacagcagaacagcaaaacaaatacaaaagataccgaagcgaagagcgagaggggaagaaaagaagaaagtaccgtctggcggtggacagagggtggccgcctcactttttctgatccacgtggttccaccatagtaaaaatagaggaagagagaatatgaaacagtgattactatatagagcgattaattagattacatgtactagctacaatacaaatatatacctccatagtttaaaggaagtaaggcttatccctcgtggactctctccactgtcattccacggttctgccaaccccatggggtctttttttggttaacctgtttttcctatttgaaacatctatatgtacatttggttctcgaaatccaaccattctatattaaagcccctggttactatcatgggatcacgtcatgacgtacttgggcccctctccaccttgaggagtcacccagttaatgtcttgtgtgggcaccttgatatcacaagtcttgcagtgaatgcagctggtagatagttagtatacctctctatccccacgataattcaaatcgagaaacttacttttgtgagttgatctggaatcggaccccgtactttttgctagggtcctccacgtattcgtagacgcctgcaggacagaaccggttttcaatacccttgtaaaccggccatgagaggtccgtatgtttatccatgtccttcacctgcaggtgaaccggttcgtcttcctcatgattggttccagtccggctgacactggtcaggatatcgaaactgatcactccgtctggcttggggtaaacgatcttctcgtattcagaagcaggcctggtagctgctgcatcagtgccgtggtggctgagcgtccagggcacccggcccttgaacaggtaggcctccagaccggagtagagaagtcctccgaagaagccgaaaggggtgttgaatgagggccggatgttccggacctcggaaagttccttccaaatggatgaatcccgtagagatttctcgtagtcaaacaagaagacggtgccttggctctcacccttaagcgccgagtaggcagcctcggcggctaacatgccggatttcattgcggtgtgggtacccttgattttcgggacgttcaaaaagccggccgtgtcaccaatcaaggcacctccggggaatgcgcacttcgggatcgactggaatccaccctcgttcagtgctcgggccgcgtaagaaatgcacttgccgccctcgagaacctccttgaacatggggtggtgtttcaacttctggaattctccatacggcgaaagccatgggttcgggtagtccaatcctgtcaccagaccgatactcaccatgttatcgccaaagtggtacatccaggctccaccataggtatccttgggaagagggtatcccatcgagtgggtaatctcgcctgatcggaacttctcgggctgaatctcccagatctccttgattccaagaccatatgtctggggctggcagtctcgtcgaagatcgaatttcttcatcacctgcttggtcaagctgccgtggcaaccctcagcaagaagcgtgatgcgggcatggaactccattcctctctcaaatgtctccttgggcttgccctcccgagtgagtcctaggtcgttggtcgcaatgcccttgacggagccatctgtgtgatagaccacctcgctggctgcgaacccagcgtacacctccacaccaacctcttccgcacgctctcccagccacttggtcagctcgctcagactgataatatagtttccctcgttgtgcatctggggcggggtgggcagcgggtacgagccagtcttcgtcaggaagcgcatcttgtcgcctttcgcgggagtcgcaccctggaagcgcgaagggttgtcctcggccagccagtcgggaagcagctcattaagagcggtcggttgcagaacgtttccggagacaatatgggcgccaatttcaccggccttctctagtagaacaacgcggaactcatcgttgcctgcctcgttggcaagttgcttcaagcgaatcgcggcggcgagaccggcgggacctgcaaaccaaagcttggttaggatatatacttggagaaccaatgtggcaaaaaatcacataccaccgccaacaatgcacacatccacgtcatcggactccctgtctaatgtgcgaggatcgaagtcgccattctcgtcggtgaagcgctttgacagcgattgcgaaaaggctcgtgtctgggttggcgcggtgaatagtggtgttcgccgagctaaacgtcgcccagaaagtgtgaagggactggctgtgtgcgctggcgtagcaatggagacggaggaggtagctcgtgcgaagcgggaggatcgaagttcacgcctcaatagaggcaagacggcaccttttgatgccatggcggtgtaaatggttcaaagatcggaggctgagacctggattactttgcgaccagtaattgagctgatgcggggactcaggatatttacgtcgtagatcccgagtgtctccagtacccgagttctgagtggaagtgacaaaaacgccgaaaaaccgcctggctaccctcggctcacttctttcagccaataagcagctgggcgattatccaacttccaggcctgaggcagccatggatggatgccaccgcccgaagtgggaatcgccactagccgacgccgacgaactggtaggagctgggcggtttctttagtatatttagaataatatgcactggctcaactcttatcacatttatgcgccgcggcttgactgaacttggagcccctggcggtatcctagtatatttacggagaagtataagtagtctgcaatgcccaattctcgtcacgtttaggcgcccatgttcaatacgatatagatactctgagttgatcacatgcatcacatgcttagcttccttcacttgtgatagtgaaacggaacaatattggcattagctctagacttattgaaattgcatacatatctatatgccagaaacaagcttaaatacccgagtcatactgtcaaagcagaatgcagtttcccgtattccgtattattactacatttcgcggaatgtgacgattatgccgcttcgggtatggtattcagcatactataccataccataccagcataccggaatccgctagaaaatgtaaaaaaacatgtgacctgagagttgagaataacaaagtctcaagaactgagttggtatctgtatgttgtatgttgtatgttgtagatgaaaatagattgcagggagattccaagaagttaaaaaaaagaccgatcatcgttagattgctcgcagattgctcgccatgagattcatccagccttggcagacagtggatcaacgccgcgggcgtcaaaacggccacctgtcctgatcgaaatctctagggagagtcattgatatgaaaccaaaaaaagtactccgtatagtcggatcaaatataatttccgagcgatataagctcctatcacagtcagtttccaacaagatccggtataatgaggcgattatagtgaatccccagtgtagtgaggtcagagagtaggggaggaaacaaggcaaaaaaatcagaatttttgttcagttgccatccgttaaagcggcaagaggatagcgcgtcgtacatggagtgaccgaggttagtcgatgacgatgattggactggcatgggacggatggactatcagctgcaggaggagcgcggactggcaaactcagacctgtaacccatggcgccgcggaggataaagcaagggtgtttgagccagtcaggggccgatacagagagattggcggagtgcgctgggcgaatgaaagtgaccaacgatgttgtgcttctgtgattggctcacagggtggtttcccagagccgctagcgggctctgaagccaaggttgaagggaccaaagtgccgctgctttaaccgccaccggtggcccagcctcccctgactaggctgtgactcagcactatataaagacccaacctccccccaatttaccgtgggaattttgtctcggtcttggcggatcttatttcggaaatccttcttccctccgctcctctcaaaaagcctcttgattatcaaattgatcttgatatctgctggctttctcttactaatcagatctatctcacccagatctttgattttcgagacccttgattttatcaaagggaaaaaaggtttcttggtccacagacctaaacgtccatagaagtcgagcctcaggcatcacttcaccactctctctttttcagatcgtgcagatagacaatcccattttccaaaaaacagggcaaaacattttcgaaagaaacaaaaaaaaaagtgccgtccttccgtccataatatcgccgtcgcgcctatcttgagaaaaacactttagtgtgatttttttctcgattcgttcaccatcgactgcgttgggtttcgttgcatatactatcccgtggctgtgattcacgagaggttacgtgcgaacacctcgtagggggatacattgagttgtccatctcccaggtaagaagctccttctgtttgtgtttgacgttgtgccttcctttttcttccttccgcgttctttccctcgacacaccttccctattgatacgttctcgggaatctttccttgttgatattttctcttctcctcacgtgttcttcttctctccgctgctctgtcacgcgtcgttttttatctcgcgacttttcgcgactcgagctgacagatcttcttgatcagttccatctttattcttgtcacaactcgagtattccatcatggattctctcaccacccacccctccaatgcgcagcaggctcgtgccttcactgccacctcgtcgctgtctttccctggtggtgctggggatttgaccccgcctaactccgacaaggaggccttggcaatggcacagggcggaaatggtatgaatggccagcaggccggagcaaatgccatccatggcaccggggtgactcccgcttcccctgcgacccccgccgcgacccctggcgccactactggaagcagtggcattgtccctaccttgcagtgagtatactctggacgtttttctgggtgaccagaatggctgaactagttattccaaaaggaacatcgttgctactgtcaaccttgactgccgtctcgatctgaagactatcgcgctgcacgcgcgtaacgccgagtacaacccaaaggtatttattattcctaacattgctctgagagcgcacgcatcagggtacaatgtggctgaacttggttctctccttagcgttttgctgccgtgatcatgcgtatccgtgaacccaagactaccgctctcatcttcgcctccggcaagatggtcgtcactggtgccaagtccgaggatgattccaagctggcctcgcgcaagtatgcgcgtattatccagaagcttggtttcaacgccaagtttaccgatttcaagatccagaatatcgtcggctcctgcgacatcaagttccccatccgtttggagggactggcctctcgtcaccacaacttcagctcctacgagcctgagctgttccctggtttgatctatcgcatgatgaagcccaagatcgttctcctgattttcgtcagcggcaagattgtcctgactggtgctaaagtccgcgaggagatctaccaggctttcgagctgatctaccctgtactttctggtatgtcttgctggattcgctgccaaacctttactgacttccttcttagatttccgcaaggtttagaaagttccagggaagatcactctatgcgtttcaaacctgtattaacattgctttttccctttatgaggacagtcgtctgaggtctgtccgtatctcgcttttccttcggttattacgactcttttcatgcaagcatagttgggcgtttttagcgattcggatgatccccggttttctcacactttcgcgttcttccacacaattagattgctgcacaccgcagtgaggcggttgtgcgccggtcgatgactgcctcgatttaatcatttatcgttctacaatctgtggaggattttattcccacgggccaaaaaaattaatggtgacctaaggcagtctgttagactcagctccgtccttgttttcccctccggggttgatggaccggctttttgccgtgatactaccttttgagtagtcaatgcaaatgtcttaaaaaagaattcctctcgtactcgagtagatgtagtttgtagctcaagccttgatctgtttatagtctaaatgcctttctttatacatccaatgtctatgctatatacatctcatggaaggatacttccggtctagagcacactgctccgcgaagccttccttgtcttcgccaactcgtctttcagaatcggtctcctatccccagatcgactaccatcgccatcaaagtcctcatcattcgacacagcaacctcgggccaagtccacatcttgcttaactcggaatcaagcgtgccctccagcgcatccacaaccttgtctccaataacagggaagaacttaaacgcgtggccgctaccaccggtagcaaggaaaagaccttcatggtcagggtgataagaaacaatgaagtcacccgtgggcctgttcaacaaaattagcacccagtccacagacaactaaaagaccaaactcacgtatcagtataccaacaaaccctcgtattaacaaactccctctccgcaaaacgcggcaacagctgcctcaaggcaacgcggaacgcatcctgtccttcaagcggcacaggtaccccattctcaggcagactaaccaccatcgagccctctccagcaccgggaaccggcacctcaacgggattgcgatacccaaacgcatggcgcgcaatcttgagcagattatctcggggcgggataataaagatgcccgtcgcgaagttcaaaatcgtcggcaaattctccagctcgcgctgctcctcatccgagatgcgcatataagcaatcgcctgtccggtcgcaacagcccggccgcgcaagtccaccagcttcgacgtccacgcgccagtcgccagcaccaccagatccgcctcgagggtcgaaccatccgccaagacaacaccggtggccttaggcttggcaccggtcgtgtcatagagcacacgctcgacatcaccagtgcggaagatcaccttcccctcagcgtcgaggacgcccttggcatagcgcacgctggccgcggcgtcagaccacccagacccccagttcacgtagccgccggcgacatcgagcgtcgagccgtaggccgggacgacgctgagcacgtccgcttgcgtcggcaggaaggtgacgttgtcgccgagctggcgcacgttggcgtagctcttgcgggcgtactccttcgcgctggcgctgttctctgggtacacgaggagcaggccgttctgcgtgtagcggccgtcgcggccccagtctgtgctacgccagcgctcgatggcggctgcggcgagcttggagtaggccgtgttggcgtagtccgcccgcacgatccgtgatgtgtccacagaggatccgtgcgggtttgggattgtcggtgaggactctacgactgttacttgggattctgggtgtcgctttgacagggagagggcggtggatactgggaaatgttagctgtgtgggaattgatatcaaatgcgtagtgtagtgtgatagtgtagagtgctataggttctattattgttcacacttacatccaaacacgccccctccgacaatcagaatcttcgacggcaatgccatttgcaaaaatatgtgtgtttgtgggttaaacaccagaattggagatcaggagatggatttctccaattgatagataacacgccgataacggcattgctcgtcggctcagctcccgacttttctttcctggtcgatatcgtttctccgatctatacggaatgagatgtgcgactgagctcgggatttgattttgatccgttcggttttcatttcttctgcctctaactttcctttggtctcgcgggctgacaaccctgtcgcgtaagcactcaatcttcgcgtcaaaccatatatgcacaacaggctacacaaccctcggcagtccattctgctagttcaaaacatcgtaatgaacgtaaatcaattgcgccgagtgccattaattgcaaagtggcccgtcacaccccgccgcagcgcatcaagcaaagcacctcgacccaagccgaggcatgtaaccagaaccattcaatctcaaccccaaactgacaccctgcagtccccaaaaatccaaaccagtggcgataaaacggcgtcaaccaaccccgcctcgccaacatcaccccgagcgcccatcctcacagcccgaaacccccgatgccgcaacagcaaaaccaagccatggcatcccacccagagccctaaccttcctgggcatctccgcactcaccatcagcacatactgcggctacctgtacgcgtcgtacacgcgtgaagtaagcaaagcgcaaactctcgacgtaccgcgcgatgtctcagaccgctacaacacaacagcggcgaccttcgacgcagacgtcgagctctccgaaaaggcaatgggactcggcaagaagcggcgagatctagtgcgccaggcgcgcgggaacgtgctcgaggtcagctgcggcacggggcgcaatctgccgtattatgagctcggcgagcggcgcgggttggatgccgatgggcacgcggccgtgctgggttgtcgctcggttacgtttgttgatcttagtccgcagatggtggctattacgaaggagaagtttgagaaattgcatcctgcgttcccggcggtgtttcgcgcttgtgatgcggggaaggttgagccggctgatatcgggcgtgctgggaagatgcaagcgccggtttactttgataccgttgtgcagactatggggctttgctcgatgccggatcccgttgctacgctgcggcatctcggcacggttaccgagcctgtgagggggcggatcttgttgctggagcatgggcgttcgtattatgattgggttaatcggattttggataatcttgcgccgtctcatgcggatcgtcatggctgttggtggaaccgggatattggggagattgttcgtgagagtgggttggagattgtggaggagaagcgttggcatctggggactacgtggcgttatgtgttgagaccgaagcagagtgagaagcctcagtcttgatatggtgtggcttggctggagctatgtaacataatttggaaatgtgtatgaatatttggcgtgataggaatggattcagaatagactatagaattcaagtgatgagcaagaacttatctcggaaattggcctcatccatattcatccctctgtccttaataacgatatctgaagccgggcgtcttccaatccgtgacatcctcatagtcattcgataccaattgcacccggttcaccatatccgccacattattcgaatcgtcagcgtccaaccccttcccaccaacagcacccgagtttccagcactaccctcaaagccctccagacgcacacggcgagcattagaccactgcaagtagaagcgcagcaccaacgccaatacgaccgccagggcatagcaaatcatgatcgtgcggaaggccgtgttataagtcggggcctcctcactaaggaagaactgaggtccagagatatttccagcgcagtaagccaggaagagcattgcagtgactgtcattttcttagtgacaccacgataattagcctggaccagcgacatggcaagcggcattgcggccggaccagtcgacaagaggaaatatccaaagaattgcacgcccaggacgatatgcgcgcgggagtagataatggcactgccgacgacgcaagggatcacaacggccacgataagcaggcagttcagttggcggaaacgaccggccagccagcccgttccggtgattgtggccacggtgatgagcgagtaagggatggtgagcagcgtggattgcaagtttgtgaagccgaacgagacaatcactagattggcaaagttctgcgttcctccgttggggatctgggtgcaaagctccagtccgaatataagccacgtctttggatccatcaggcattcgacgacttggtcccatctccatgcggtcttctctgttgcacctgtgcctgcaatgacgactcggttgtttgcaaactggcgttcctcttccgagaggaatttagccttggagattgagtctggtagtagagcccagacagcgaatccccagaggaatgtcgcgcagccgaggacgatgaacatccacctccatggcccgacgttatccttgacgtgacctagtccgtaggcgaggagactggaaataataccaccgacactctgtaaagatgagcttttattcaatatattgacaggaacaacatacgtttccggcgaaccataggcctgtcctagtagggatctcgtcacgcgtgtaccacgtcgacgtgataaacataaacgccggcgtgatggttgcttcagcgactccaagcaagaagcgaactgtaatgagaccgccaaagttggtgcaggctgcagtgagggccaccacagcaccccagaatagcgtgttggccgtcaagtatttggcagcgggcagacgggtaatcagcaaggttgttggatatacccagcccaggtagccaaagtagaagattgatgatacccagctgtactgttggccaaccaagccctaaaaatgatattagttgtggttcttgtttgttctggacatgttcttacagtatcgtccctcatcccgaagacagatgcgctggacaagatggttttatccatgaaattaaacatataagtcgtgaaaagcagtggtaccagtcgtctgtcaatcttcctcaggactcttttcgccatagcgtggtcgggggtaattgtttccatggccatttttagtgaaaagaaagggaatactggatctcaagacatttgaacacttgaactcttcttattgaaaagttcatattcccctgttatctttccccgcaccggtaatttgtccaacctatacttgttatcgccgtgatcgggcgccaattggacgaggatgaagccaagtcctttagggctagagctagtagctagtatggacgatcttttcggagctcttcttctactccgaacccaactctgaatttgacatcttgccaactacttactccgaacttgtattgatttcgccgatagtgagaaccacttcagcagtaatcatgaacggcctcacaatcaccccgttcatagccaatcttcccaaggtcgaactccatgttcacattgaaggcactttaacaccctcactccggtgggagctatcccaccgcaacaatattcccctcccgtacgccaccttctcagacctgcaagcctcctacgcagtaaccctcaaccaccgacctgagctcaatggccgccaacctggtatcccaacctttctggaagcctatttcgccgggtgcgaagttttgcgcgcagaaaccgacttctatgatttagccatggcctacctgcgccgatgcgcagccatgaatgtgcgctacaccgagccctttttcgacatccaggcgcacacacgtcgcggcatccccgcagaagctgtcctggacggatatctgcgcgcgcaacacgacggtgccgctcagctgggcgtgcattcgcgctggatcatgtgtttcttacgcgacgagcctgtgcagcagggtctagatgcataccgcgaggcgcggccgtgggctgctggaactgttgagggcggaaagggcctgtttcatgctgttgggttagcgagtaatgcgtacgagaggccgccgatgcttttcgaggaggggtttgcgttggcgcgcgcggatggcttgcatgttactatgcattgtgattttgggcagaaggatacgcgggagcatgtagcgcaggctatttttgaggtctgtgggggaaaaggggcggagaggattgatcatgggttggatgcggaggattgtgaggtgttgtggcaggggttggtggataggcggattgggctgactttgtgtccgcatgcttatcatcgaaggacggcgacggaggttttgtttccgaagattcggaggttggtggagaggggggtgaagatttgtattaatagtgatgatccgactttgatgcatgatgtctggattgatgggaatctgcagaaggtctatacttattgtgggtttagtcggggagagatggtgcagctggcgaggaatgcggtggatatgtgttgggctgaggaggacatcaaaagggctatctatcaggaattagttggtgttgatatttgtgaataactttcctaggagggttgacttccccccaaacgagatcctgacacggaatgttccagatgactttttcgaaggcaaactgagtaccttgtttgtttgataattgtgagaacagcaggtcatgtggcagtcttacccctcttctattcaacttagtccttcatcctcttcgactttcatccttcttgatacctgatagttacatcccatcaacactcatggctcggcctctgaggatgatttcaccggccatccactgatgatatattctgtcatctctatacaatcatgatgtgaactcgctcagctactgctgatttccacgggagactctgaggtccgggttttccacactcaccttcaactcgggctctctctctctctctatatatacggtgggtcttatcatcaccctaacctcttcccttgataactgctaatctacgaaggcaaggatatggaactatctttcaacctacacaataccaaaacaggggtcgtcaaatgagagccagccggactccaacaacaagcagaaaacgaacagaaggccagctatatcaatagctatatagaggttcgcagaccaggccccaagcaccaagacctgtctcaacagagaaccttgagcatatactatggcttggaaggaatcgtatccagcgccttgtctcaatatacaggtgcgaagacttgggaaatgctccctatctctttcctcgaatcggatcgtggacattcggtatcccgcagggcagtggctagcctagccgctttttttacaccctcatctcttctttgaccacgagtttggacctggtttctatactaccccctcactcaaatatatcttggaatacgatggcctagatggtgtgattttgattttcaatatctttcgctcgcaaaacatgatgcgggggttcgaaccgaatcttcgactatacattcaagctggaaacaacccaaagacatcttgtacatgctttcaaagagagcatgagaaagacatcaaagtcgcgtggctacttccagagttgcctgattctacaatatagtaacggcagcggcccaagagaagctggtgcagaactacgaatcttccatggcaaccccttccgaggagcgcagaatctgttaataatgctggaccggaattgaccggtcttgtggttcgatcaagtgatatatgatcgagcgattccttgaagcgaacatcggagttgactaaaagaaccgaagagcactcttcctgaccttctgccacggactctcaaaccaccaccttctcctagataatggtaatgattgaagggtctgggtatccttactttgaaaggcatccttgagtgcttgtcgacattacgctcgcgtcaactgtgtttatttcggccgagttatgggtgagcctgctcctagtgagccaacgtgaacgaagtatgcaagactgagctgagccatcgtcaaccgaggaaatatgagtgtgcctgctgttactgagccggctctgaatgaatcggacctgacttggcagaccaagaccatgctgttcagagcctgcggaccggtattcgttcactcgatatgtttcttgcgacgcgggcggcagggagtcaggctcatcctagcatcatggcttttccttggaaccacacacatgttagtatcaagactgacttacatcactccaccctcagaatttgtctgggaaatgctatgtacgttctatgtgttatcctatccttctagaaagtggcgctaactctttcacttcaaaatagttacccgaaatcatcagggtatcgccgaaaatccgtcatctcacctccgagaacagcttattctatcttctttcgaccgtaagacacattggttttcgcgacgaatcaagtgtcagctctgtgttgacacctggaaacacaatggtttctaacaaagatggggaaccgtatcatacagagcagccatgagatgtgtggttcagggtcctgcttgactttccaactctccaagtaggacccaatcacactattggtagtgaaatacggagtactccgtataccaggtggattttataggaaggctagagccatgggccaacttcaagccgatgtgctgtcgtcttgtactcgccaaacccatattggagccacacaaccattgattatgaccatgagtggccagggtgcagacaattcggtcttgcggtcttggaagtggctatgcagaaaatagaggaattggggtggttggtgttgaagattgcttttgaggcgattctaaatagacatatcctaccttataagttatccatgattacaagctcaataacaacacagcatatctccaacacaagacccggtatggaacctggtatgtgctcataatcataaagcggcacccgatcgggagatccccgacggcctagaatcgaatagagcgacagacaacatatgttgcgtggactagtacggagtagccacccggcagtttgtcggcgtggattggctgatgcggcatatcgaacctgtcccgcattcaaaacgggttttcgccaccaatccccatcattgattctcatgcaaggcgcagatcttttgcaggggctgttggatgcattctttgtttgcagttcggtcgtggtgtggcgggaaagttggaaccgaggatagtgagtttaggtaaggtttggatagatgcatcgattctcgaggggtggtttcattggttgtttagattgagatagcatatctgatacacgcaagctatctacaataatatgatatacttttgaatgcatagctggtagataatgtaaacataaggagtacgctagttaaaggggaagtggacattgtaggtacctgcggttgtggaggtgcggagaattcccgtgcgtctgcatggacattgtaggtaatatgtcctgcctgtaaagaacattggcagaattcgacatttaatgcgatcagataaactagttcactaaggcaattgttccctttcggggtgacaatggccagttcccatggttgacgatcccgatcccctaggcccaagtggtcgatgtcatgaaaacggagatcagagcaatgccccactatgtatgtgctttctacaatatatgtacggagtacatgcacagatcgcaggggtaccttcaagaatgatatcttgatacgcagtacgtattaccgagacctacagcacctgggcagcaatgcttgtcagtaatatatacatcccttgctggataagagattgggcgatgatgtacaatatacgacgtactttttgggtacttttaggtacttttgcaataatatcccaactgatcatcatcatagagatgtggatgagggctccgaaggatgtcatatgcacgtaggagtatacaagtgttatattctttccccgatggcaccacttttcagaggcaactgcggcaagattggctttggatatttataatttcccccaaacgatagatctcaatatatggtagctgacagtgagatatacaaaaacaaggtctcggattttacatcttcggtggcaaacgttccttttctccccgagacgctaatgtgagcatcccttactagcgtcatgtacaatacgatacaccgactctgattgatcgttgtcccgtcgattgggtccctggggtccaccgagaagtggagcccggtggactttaagtggccactccatatcttttttttttcttttccgtttcttttccttttctatttgtaacggccgcgctagagagcgcttttgggtctcggtgtttccgaccggagggttcggcttaaagccttgtctttttttcctggtcaaaaccgacggactggacgtgttgatggtggttttggaatttgatgtcgtgtgtgtccatgctcaattggtatacttgcataattagtttgttgtacaactccataagttaataataactatattttgatctatcaacagcggtgtgtttctggctcccccagcaaccaacaggtgacagatcaaataatctcccttaccagtctcctccgtacatatcccatgcagtaggaaggctccgagttcaacaagaccattatccaccgtgcaactaccaatcactggatcggtaggtcttattattcctcaaagcatcggcttgtgattagcgggctccgatgtaatgcgggatgggctaaccactagagttgttgggtgaacggagacgccaagggccatggagcaccaaaattggacttagtcgggtcgtagaacacatggatgccccacccagctgtttcggtatgcactaagaccgaagatagaagggaaagaactatggattcgcatactaaggcccgaagaggaatggggtgatccgcactgcctggggattgttccctttttgcctgtgcgtgtcgcatgtcgtatgttgcattattctggcgtggatatagcggtgaggcgtgtagagtggtgttgaagctaggtgggatatatagtgctaagtacaatatactcccgagtctacgctgtagataggcatatgcgcatgtacaagtacagacattcttaaagaatcgaaaaggaaaaagaaaaacaagccccagaccagccaatcatcgctagactatttcgggaggctataataccgtacggtaatttacgccgccaatttttctcaattttcgccaatttccacttttcccaattcctcaggcccccggtaatttgccatacaaacacgctctgcctgtcgcatcttgatgatcccccccatttatccttctcatccccctttctactaacatcccccatatcttagaatcgtttttattattatccttcttattactctgtttattattatattctcttcgattatatcctgtgttttatcgtgattcttgattcttctgctctactccctcacaatgccgtacaacactcgtcgcaagtcactatccctcccgtccttgggaattcacctcccaaattccactcgtcgttctccctctatctcaaaagtccacagcgatgagcaacccacaaaaaaagtcaagagatcgcacggtgcttcattatcacctgaaccctccgacaagatgatgcgcgctggccgacgtggactctttgagtttacaccgcccccttcgccgatggatggagtgcttgcgcccaagatcgatacagaaggaattaacgacgacatcgttatcgctgtaatcaaccaattagagaagactggcaatcgccctcatctgatgaaagaattggccgcagtcctggtcacactaaatgtcaatgtcgcgaagtatgtatccactctaggcttcctcaaaacacgatcgctaacatctcctctcctagttccgccaatcccgctgcgctgctctcgtcgcgcttagctgcctatatgaagcgtccttggaccgccctctcgccatgtccgatggccaaggagcttattttaattcatccgcgcaaagtgtactactatcttactacgtttccccaccaacccattccggagaccgacgatctggtatctgccgtgggtagtaagcacctcacacccagtgtgtccagtctcgaggatgaggaagacgcgatggtgcgggaacgtagccccagtcccgaagtggacttgtcgtcccccgacttcgaggagcatggtgatttgaacccctcggctagccatggcggttcttctaatcacttctccaccgctagtaatttgacgcgtcttatgaactcgcaccgtgccgcttctccgcccctggagggtgacgagaaggaattcacacaaactgccagcgccgtgcgtgagcgtgcatccgaggaaaaagccgagtcgagccgtagccagtccatcctgtccgagagcctgagcgccttggaggaccgcgatacgcgcatgtctgaatcgcctatgaatggtggttccatgtctccgtctctgcctggcgacggtatgtccgaagaagagtatagtgactacttctcgcacatgcccatcgaccaaatggcccaggatctggacgaggctgccgcgactgccctgtttggcacctccccctctccttccctcacctctatcgcatcgtctgtctcgtctggcacgagcgcattgacagatatgggtgtggatggcgaggagcttgccggcgctctggttgccccccagatcagcctccccgaagatcccgatgcggcccctgtttcgtccctcaagcgctcgcttgatatgttgaacagcggcctcccagatgtcgacctgaagatgtcggatctaacggaatcgcacgagaggctcacccttacccctcgcgctatctctatgaactcggagcctgtcttcgagtcctggagagaattgcagaacccggagatggtggaagtcgacgagctcgacgagatgtttggcgaattctaaactatcctcgacctgagtccatttatcccgtttatggttccgctcttctcctccttctctccactcctagccgggctgtgtcccgtcatgttctctttacctcttttacgtcgcttgtacatgctcattgttttctcggcgcaactttcggcgcacccttttacttttcttatcgctaatgcctattttccttgtatatatacatttgttttggactatctaccctggaagggtagattgggaggatattcacgactggagaaatggctttacccaaaagtgtcaaaaatactagcgtttcttctcataaattcatcttttctcatcttcatccatggttgtagttgcaaaagagacaacggttcctgactaagcagtgcccaatcaggaaggcgggcagcctatcatccatgggcagcagcctagagcccacccgtgggccgctttaacagaatccgccactcgactcggctttgtactgtattttctttcttccgcgggacattcgtacctcgaaagacgggtctcaaatttcccttatacatacatctcctttcccgacctcccatatgcaaattcagccctatcatctgtcacaactttatatacatagcgccgcaggaacccaatatcgccaaccatactctcgccaacgtaaggacttctgcgacaatgacggccggagaaccttcgcatacggacaaagacggcgccgttcctccacgcgagacgtccaccaagcaaccaacagcggacatcgcgcctgccggactacgccctctctccatcgcaaatactatgtcaacaataggcgccaagagaaccaatccgggccaggcttccttgagcaagacaattgccgcatcacaaactaaagttgccattccgcgtcaacgggtcgccgctgccccgcgctataatcggcgtgtgccgcgtgcttgttcgtcttgcaggcagcgcaagacgaaatgcagtggtgatacgccgatttgtcgtcagtgtcgtgaattgagggctacgtgtagctacccggacggttggagggagaagacgaaaaagtatgtataagtgtatctgtggctacgcgagccagtatgctgactagctggttacagacaagttgaagccctgtcggaaaaagcgcaagaatatgaaaatttgctgaaggaattgaggggtatggttgagtttagtgccgcagagcggatcagaagcttgctggacaaggtttgttcttcttttgggttatcggagtgttgctaacactcgtaactatagtatggtccggaggtggatggttcttcgcaatcccaatcccgatctcaatcagcaaccccgcaagatgacattccagaaaacgatgaaccatcctcgccttcgtctattgggtctcttgaggcgattgatcgagtggaagaggatatcaatcgatcaccacatgcaagagcaactggttatatggggaaaaactcggaaatcacctggatgcaacggctacagagagaggcagaccaacgtgctcaaggtcttccggggagtttggagtttggccaggaccccaagattgataatgcagtggctttgcatgcggtcaattatcatcttgacgacttggatatttccgtgcctgaaccggtacagctgtatgccatgcctcctcgagaggtcgcggatcatatgttcgaggcttatttaaccactgtgcatccgttctttcccatcatcaacaaacctcttttctcagcacagtaccggacgttctttgacagcgctgctcgacccggtgacaagtggcttgctatattgaacatgatattcgcaattggagctaaacatggccacctcatcgccgcaccatggcgtgggaccgagaaggaccatttaatatacctaactagagccaggatacttagtatgaacggtgatgtcctgttcagccatcccgatctccaacaagtccaagtggagggcttgattgcattctaccttctcgcttctgatcaaatcaaccggtgggttaagaacttcctctcattaactaaattgagtccaccataacacttaatagggcgtggagaatctcggccttggcagtgcggtctgcaatcacacttggaatcaacatgaaaagcagcagtccagccacacctgatctttcgaaagaagcccgttaccgagtctggtggtgtctgtacacatttgagcacctactcgggataatgaccggtcgctcaacttgtatccgggacggagtgtgcacctcgccattcccgattccatttgaagaagaacagctgcaaatgcccgaagccgtcgaagtactcacatatgcggcactacgagacgaacggatcaacaacgtcatggcaagttcgcgtatcagacaaatgccgctccacccggtaaatggtaaagatgctagtcaccacactcgagcaaaaaacactgaatgggtcaaaaacctacctatcaactacgggctctgtcatctctactattgcgacttgacagtcgtcgtgcaagaaatcgtcaataaagtctattcagtagactgcgtcatggtgccatgggcccagatcgagcaacggattagtgaactcaagtcccgaaccgacatctggaaatccagccttccaaccgggcttgactttacacgcaaggatgataacgggccagatatccttcgctgcaaaatcagcttagcgttgcattactacagtgcgcgaatcacactaggtcgtccctgtctttgccggcgcgacgcgcgccgaaggggcgcgcacccctccttcagtcacgaaatggcagtgataaccctacactctgcacggcacatgctggatctagttccagatgagccagatgccatccagctataccgcatcgctccctggtggtgcatcctccactacctcatgcaagcaacgaccgtcctcctcctcgagctctccttcggcactgtccacatgcccgaagaagaaaacaacttcgtcgccctgtccaagaaggcgatccgttggctcttcgccatgtccgagcagagcattgcctcccgccgcgcctggcaactctgcgacctcagcctccgcaaactagcccagggcatgaagtacgacgtcagtgacatgccttcctacccatacaccccagagcctaaaagcactatcagcccggagccgctagctggccagtctgtatctcaagctgatggcgactactggggcccacaactagaacatctccccgtgtctgttccggagggaccgcctcgcgaagaccacgacacctcgaccgcagagctgatgacttcgttgacggccgatgcccaggactcgtacttcccctatgatcctatctccggggagtttatgcgctctttctttcctaattctaattctaatgagaatgagaatgataattgggaactttgaatattgcatattgcatacaattgtcgcccatactcacttcacgattgttttgtgtatgaaaaagaaaaaaagctacagaataacatgtaagaacatgagaagagtatgcgagctcgcatctctctcttttttccactgacttgcccacttattatataccccaatccatcgccctatatccaacacgtccctatcctcagcagtatacttaggaactatttttaacatattaacatccctatccctatacctatcctacttatttcttgtttcttccttaccgatattcatcacttcttgcataaggaactgcttgctctctattaggaattagtgcagtgaagcacagaagagagcggcagttcttcacgattgaaacatttccgtatgtgatacccatctctttttttctccatttcataagcctttctccctttatctaccgcgaatatctttctgcattacagatattttcacaatgggttggcaaaagtgatatctcatgattgatattgattggggctgtgcccactctagagctggacttagaacgggggcttgaaagggttgagattgccatcagactagaacttttgatactaaattcattcacattcatttgtcagcttattcattaatgcaatcagcacatcgtagagtaaatatccaatccgaagaaccgtcctggctcaatgacacagccttctcaagaagtccaagtgagaaaaaaaaaatagtatatacattcgagaatagtttttactttgaagataaaaatacatatagctaggacccataagcaaagaatcagcctagatattggggttatcataaggccacttcggctccggctcctccgccggcggcaaagactccgccaattccttcggccagtgagatctcatgaacggatcggatcggttgtacttgatccgcatcctgacgggcctgcgcgtgggggaagaaaagacctttcggagctgcatgcggcgcatgtggccggggatctcgatgtcgacttggtcttctgggagaccgaatttcaggaaggtctcgagacagaagtctaggatggactcgagctcggtttggggcatcttgccggactttaattgataggggtattccttgcgggagatggagggtgtatatgaagcggcgcggtcgtagatgaaggaggaggaagtggtgttattcgggtcggtcttggtcttggatttactgggacggccgtggggttgttcgtcagtggcttgtttcacgcactctgcatattctcggacggcacttcgtgcgagaatgcggacagtgttgaggtctgctatcgtggctttgcttcggacatggttgacgtaatctgcgtcccagcctggggaaccgtgtgcattggcccgttcatcactgaacagcagccgggcaacaccacctggagattggagctggcgcttgggagatacccagtcgacacagactttatcccagagctgcttgccgacgatagcgccctgcgtttcgacgacggcagcgaagatctcgtggaaggtggctgggggaatcaaagtggccttgtggtgtccggtgatttccttgggtggctccacttgtttgaggatgtccgggagaggacctgggatgagggagagcacgcggtgcatacgagagagtgttcgaagctggaagttcctgactttctcacgagtagtattagcatgccactcgccgcggaaaatgcggagcaaaatgtccgtggcctgattcaggtcttctgtgtctgccggagtcaaggtgccggcggatgtcctatgtttaacggtggcatcgagccgaattattgcacttgccagtacgccaatattgacgtaaccccaagatttagctcggtgctcggtcaagaagttgagcatcagcaccacgcgcttccaatcttttcgtgtgatactgaaattgatcaacgatttgatggtgttcacagaaagagggatcgcgagtgacgcgatgacgcgctcgccaagctcgacgttagcagtggcagctgcaaatcgaagaatagatggcgccagggcctggttcccatatgcgcgttgagggatagcagggccatcgatgtcattttccaggagtagttgctggccaaaatcaaacgcgtgggttgtagtcgccacgtcaaggagattggcaaaagtggggcatgacaactgcggaatagacgattgagagatatcatgaggttcaaaagacttgaaatcaaacaacagagaggcttcttcgtcgctggcttggctcacccgttcaaaaaacctttggatgtgctgtgccttgcttgcatcggaaatattttgaagccaagcatactcgtggaaaaggcgtccgctttgcttgtcccgagcgtaataattgagattgaactcgattaggccagtcatagcggccgattcatcataaaactgcgcccgcgttttcccatccaacacttgtgccaagctcaactcgttcccttcccacggaggaacaacattgttctgggaccttaggagatcctcgaaggcaacaggatcagaggacggttttaaacagcccgaggccaatatccgtacaatgtgccaattggtgaacctgttcgttggccgaagctcctcacgggtggacaaggcaggatcaataagtttagtcagaggggctgataaatttgtgagatcctcaggaagatatccacgatctcccattccgacataggccttgttcgccaagccgctccgcagtgatgcaaccacctcagagctgatagttcggaatccaagtccattgaatggttctttgtcctggcccttgagtattgggggtttctcattttggcctggccgacgccatgattgctcgatactgacattggttttttgtactgtagcaaggtcatttataagaggcgcccaactctcagccttccattcgataagccgggtcatttgatgtacgagtagtgtgcccgttctgcaaaaaccatgctccacacaacaccatagaatgagctcaagccaaatctcaggacctagctctcgaattcccggtgtgtaaggaacgaaaggtgacagcttccctgcatcagcggctgcagcagccactgcgacttcatgttcatgccacgccgcgtcagacaaaacgctcattatgggaccggacaaaaaatggagccctggtgggcggaacacaatctggctggcatctggcttcggatattgataaactctatcggagatcatgcctgcatggtgtaaacgggcaagagttcggtatacgcaggacattgcatgctttgaatcatctgaccgactgcgtgtagcatacaaaaccaaagagccgaggtttgcgagtacttcagccagaattctctccccaaagaatctcggtgcaggttccaccgttagcgtatcaagagaaatgttgtctgacggaaggggttcgagacgagaccatttccaaggggatgatgattttgtgcctcccgtgagcttgctgagagagaccttcgaggtaatgggagacaccaagtcggatgttgactcatctctgcggcgcacacgatatggtctattccaatcaagcccagccgaagggtgcttaggaggcatatgagcagctaacaactcataggtgtctatcaggctatttaaaagagcctgcacattagaccactcatggtgtgcaaatcccagatgcgcgatgagttgaaattcaaaatgaatccttccatcccatagacaccccagtagagcatgggtccgatcaagctcatgttcggattcgcggagtggtcgaagccgcctaggctggccagcaggttgggcgacgtctggtggtttggtagtttttggtggaatacaatccctcagcactggcatccattcctcgatgtgtctcttctggtcatgccggaggtgagggtgtttgattaaattgtatcgacgtagaaaaagaacttcatctgggaaattaatctccctttggtcattgcgagttttgcgggtgtattgtgtccaagtcggtcgggagaaaggagacacggatcgatatgggataaacggtaggcgtgaagcagttggcctgcgaccgaatggcaggatgcggccggggcgcaagcacctgctcatggtaccgcaacgaggcttaaaggcgggtgtataggtttcgcgatctcgatgggtacgggattggcgtgatacatgtcgatttcacaggtacatagcggtatattcacgagattcaattgaaccccataccaacaggggcaaatgacgaccagagatgggaggtgaggtaaatgttgtttcgagaattttggagatcaggaactgctgagtcatcaccgagctatgaaccaatcggaggccacagaatgcggagtttttgacaatataagaccctacattggaactataagggaattctctcctagaatattcagatctggattagatgatatgtagaatcagtatattttctgctaagtgagctctgattcacgcgatatccgatgcctgagcaccgagggcgcgactgctacgaatacggctatctaaagaacgccattactatcaacatctacccacattgttactggtcgagagcctttatccactccaaagttcttcccgaagcttagaatttaggatttccacggcatattggcatgaaaaatatctctcaaattcgatattgtttgtgctgtttgtgcatgccctaaagtacaatgaaatgttgccatggagcttcgatctaggtttccgggcccgttccaatcacatgcatacaagaccatccgctaaggctagcttctacttttctacttttgtgatggttatgttatttgctcacaactttaccgttttactacttactctacatagcactcgggaaaagactccaagatagcaacaatatcttctctatgctgatccagcagcgacgagaaacacggtaatgatctatctcacatgccatgcgagcgaaactgcaaagcacgaaatctagtacaacatctgacgggcatgatgacgagcaaagtctccctgctcaccagcaggaagggcagtcacggtcgcgataggcagagtggtgaaggaaccgctagaggactggctgcctgagaagccacccgggaatccaaggggggcaccggtagactcggggaatccagaaggctcgagcgcaggggtactggaaggagcgccggtgggcttggatccatgaccgtgtccttcgtggccaggtccgtgaccagctgctcggcgatcaaaggaaaatccagtaggccatccagtgggccatccagtcgggatgtcacttggagtgccagttggggttccggatggagttccgggtgggaaaccgccagggaagccaccaggaggagaaccggtaggagtagcagcggaggtcttgtcggcgtgctggcgagaatatgtcaataaagcacgagatctatgaggatctatagtgtagatactcacaggcaacttccaggctacgacagacggggccaagaatagggcggcaatgccaaaggtagcagtgaatttcatgataaagtgttgagttattggacaattcaaagtgaaagtggaaaatgaatggatgctaccggtagcaatgtaaagaaagacctgaattgagaagaatgaaggtgcacagcactgtagttgaaaagaaatcaccgagaacaggaaggtctagctggttatataccccttgcgtttcactgttgagagtcaaaatgatagattgagccgttaaaaggtcatcaaaagaccgccaaaagagtatgtgttccgcgagaggagtgggatctgcaggggaccaggtctcatcccgtggcgaaataattcaagcaggagtgatcttcatagatacaaaaataacgctatcacccggagtgtagcatattgtagtggaaccaggaactacggcacaaatagtggatggaacgcatattgtgcggagcaggttgtttcagacaaaaagaccccgataaaacgggcgaatgatagttctccaccttgttctgcacatcagctcctgtcgatcacttatgtgtctgatgaaggaggtgtgtcctgtttagatggagattggtggagccctaaaggcggcaagcccgcgaaggtctagaaacatacactacgcaacattaccagaaagaatctaacttgtgggatttcttttttcctgagcgtatattgtatgatcgctcatttacggagaattagtgctgtaataagtctgatgtgagcatgcccataaatcctcatgttatgctttattccttgtgtctagaacaagttatatagtttaggtcgtttttataggacactttatagagttaacagactagattgtggaggtacttagttatatacttatagtgccatgcactggtcaaagcttacatactacgcgaataatacctaactccatgtggtctagggcctacgcttcaagcttttgttgtaacttattcaatccgttgtggcagatgctctcaattctatgtaaaatttccgaaaagctgccctcgatttccaaatctggatgtctttacctttgaatgatcgactaaggcgttaaaccaaggcaaaaccaactcgaaaaagcactcacaggtccgccatttacaactagaatatgaggacatgtaaaaaagagaaatgtccaattctggcactagagacagccgtctttccaactcgtagttatctattctgccccgactagcactgttagtcatcctcctgtggccattaattatggaacctgaccgaccaaagccaaccatatcggtccaaaatccggtttcctctgtttcacctcgaaaatgctaccgtcaaggctaggtggatcaagcccttgacccctataagggaaatagcacagtccaacagtgtacatccgccacgagtcccaaatgacaagccccaggcggcgccagggcctgaagtgccttaagcccaatgaacctgtttgagagaccatcgcgtttatcatttggaagtactggacatgaatttgtctttgtgaacgccattcgggtgtaagctaccaccgtgttgatgttgttgcttcattatcggggggtataggcggcggagaccagatagacatggacttactagagggcagattgaaagagtcgaagaaaggaattggtgttttctcggggaattcccaggcagcgtgggaggactcgggtccctacgtgtccattatgaaccactgagatctcactcctcggcgtagtgccatagaagggagtaaggcctaggtctgaaagaaggacggcaatcgtccagatcagctcgttgtttcctctatgtatctcattccagacattgtatgcgtctaggtcctgtattgattgtgtatgccaattccagcttcccgttgcagatttgcgaagggccgaatagtgttggagatgaaagagagactagtacgtgcggtattcttcaatccatgagaagggattccgccctttttctgcgcgctcagctccgctcagagagccgactggtatttcactgagggtagaagcaaagttctgctgcataagcggtagacaagcacaggcaaggcgctgtattccggcagctaggtggatgatgccgattgatgccctgtaatccagatttagtgtgtactcggccatgtgtgagaataggtttccgaggacgggcttcaccgctggcaccgagagcgcgactagagttccagcgatctcggcgctctcgacgcacagcatcggactgtaggcccagctgccgtcggagtcccattgacctgcggctacgagccaaacgcggattgcggagatcacgataacgccgtgacctcatatgcttgttggctgtgggcaaaatctgtgtaatgcgagatatgaacaaggctgatgttgtagcatattctctgtatctccggaaaaccggtaatagggtttgccagtaagagggaatgtataatggagggttgagtccggaagagagcgtggacttgagaggatacggatgtgaggttttctatagcggcaaaatcggcgatatgaatgaggatttgttggttcagttctgcgggtagttaagcgaatgggtccatggtggatgaaatattagcagtgaagtgtgtgaaaatgagaaagacaaaattgggaggtagttccttaagtactactcacctaccctgtgttgtctccgccaagcccaggctaattctcaaccacgcactataaggcactgtagaacacttgatatcgtacttcattgtttgaagacattaaattaccagcgtaaaaggaccagcgatcatggacagaccagtcaacgcttgtttgtaactatacatctgttcacaccttcattcccgtcatgcgcccttataattgccaatataaaatagaagatgcttttcggcgaagccactcttgtttgtggtcttaaacacacgcacctaggttggaaccttcactcccagctcgggtttgtgctggataagcatatatgcgaccccaaccccgttggcagtccgcagaagtgccttgccttcatcactttccatgctgaaggtcgtgcctggccattctttagcgacactccccgcggcctcatcaatgatcctcaaggtatccggattctggacatttttccgaataaagtacttaagattcttgattttgttactccccgcggccaacttctgccattgaagaaaatagacgttcgatagcttgtatggcgagagcaaggggccggtgtcgacctcatgcatgacaacaagtagcatgctacacgtcagctgtgacgtgtcagccagcacaaccaccaccggggctaacgtctgccacctgatagactgggatgaggaccagggagacagcagcaagaacagacctagcgacaatcccgatccaaagccaacttccaccacttccaaaaccacctcaacatccccagccactacaatagccacaggcaaacccgtcccatcgggcctgtcttcatcccgcgacgacatccaacttgtcatcttcgattccaacaagataacaagcgacggctcaacatggcattgggccggatacctcctccccagccttggctacgacgacgaggacgtctgcaacgagaaatacgaagtcatctcagacccccacgtcgaagacaaccaagcttggcctttctccatgggcccctttaatgctccaggtttagattactgcttcttccacaaattcgcggaccccctctcccccaagtaacccgggctttatctcctgtaacaaccatgcctatctgacgtggtgcatagggcttgacgggaaacatgcggtgaggaagccggcgcatacatgtaccgggaatggcggaaagaagaccgagttctggcttcaggcttggtgcagtttgaaggggtagaaatagctagttgccgccattatgcagatggcctagtttcagctagggtaccggactttgcatacaaatacctagtaagtgggagaagtagaagaatggaaaatgagacgaagggaggacgagcggcgaagacggggtcttttatgttgaaagacatattacaaaaaagaaagaaagaaagaaagaaagtaacccataccaaaagaatatatgcaatgcgcgtcctaaactgatcccggggtattgtacatgaaaccaacacaatcaaattgaaagccaaatcgtcaaatcgtcaagtgacttcaaagctcctcctcaagaacttcttcttcgccaagctcttgttccacttcgtcgacgacaaagctctcgtagtcttcaagacctttttgaacatgtactttgaagcgaatcacgtcattaagcatcgtttcgacgttagtatgcaactcctctcggagggaatttgcccgaagcgtcagttgttcgtattcgatattggtgttcatctcgcgctgctccatcaattgaacactgtcgctgagcgtagcgcgcatctttgccaattccttctccattttctcaatttgggcatcggaggccagcttctgagtcgtcgtgatttcttttgttcgttcaaactcttcctctgctgcccggcgtcgatgctccaaagcctcgacctcgctccgtttctcatccattgcctctttaatgttgtcgagtagattgcgacggtcaaggtcatcatcgatcccttgcttccgtcgttcattgatctctttccggagggattgcaggctgtttcggacagagcctcgtagatccaaattgagcaaatgcgccgggtggtagccagtgaaaggctccgccaataagcgatccccctcgggagagattgggttggcagggccaccaatttggctcgcagagaaattgctctcattaatattcagggtaagctcataatcttggcccttggcgttctcagcagctgcgggaatcaagctagtctggtagccaagagtattataagccttcacgatctgttccagatcttccagtttctggctagcttccgcctccttctccatgacacggacatgggcctcttcaaggcgagctacggtatcttcgagattcttctgtagacgttctcgctccgagttcatgcggtcgatatcctgaatagtgatgccttggcgatcaacacttgcctgtagttcggaacgctcagattcagtggcctggagatcggtatcagttttctcgatctccgtgtcgaggaatttgatgcgagtctcgtatttttcgattttgcctttgacgttttgattataatcctcaaatttcctcttgtcatcctccaagatacggaagtgtttatccaacttggcaatgtcgggagcactcttctccacttcttcaatttgatcacgaagagcccggttctccgcctctagtgcctccagttcctgcacgtaccgttcgttgccaagagcaaattctcgcgacatgttttcaacgtgcgggattaaccgcttctcggcggtgtcatcatcctcgtcttcaccaccctgtagccaatcgtgatatgcttgagtgaggaaccggaaaataatgcgatcaccggtgacatcgacacccgcctcggcgcaggcatcatcatactcgcctgactgatagcgatccatcatctgtgccaattgcatcaaccaatgtagcattccgaggaaggtcgaccagttctggccaccaacggctgcgatttgtgacttcgtaatgcctttctcatatgggtatcttagctgttttaggattggcggtacttcggagtccatcgctttctgaaacttgtatcctggatcgatccgatgatatagccactggaagataaggttgaaatccttctgggtcggtgagcgaagagtgttctggcccaaggaatgtttcatttccaactcaaagccatgaatagtcaaatactccaacaattcctggccaatccgtgcctggaaagatcggtctctgagagggcgcgggtctctgggaaccccagccacgttgggaacttgagtgaagaacgattgatgtcccatcggccctcctcccgtggatggtcgcgaaaacacactacttctgcgctgtgggttttgaggcggtgcaggaatggaggaaagagaccctggcgcgtagctctgccgactggcactggctccattgaacatgttactcgacactgatcggcgaacagatgagagaccggcatcagcgccatatggtccaccaattgacatgcgtgtaaaatttggctgctgtgggcgactagtggagcccatcaatgaacttcggtggttctgagagctgaacggggggttttggaatccgatagagcttgcgcgcttcagtgccgattgcggttgagggatggcggagaaattttgaacactcccgagagtcttgatcgcaatataaattagcctcaagtcttgcgctagataggggggatctatacctctcgggggcgcttaatactgaaaagcccagtatcttgcgacatggtgataaacaagccgcgaaggcggcaataaacaaggcgattcttttgacaagtgttttttttttggattttgttgaatattgacaaatatccaacgtccaagtggattcaccacaaaatccaagaggaggggtttaatctgttgtttggcaggcacgaggcgggatttgggccggcgatgtaaacaaatgcatgccgcttctaaatgaagtaggcggtgtgtggacacaggaaaaacagtttagccgatgatcacgagactcccgtctggggaagtcttggcgttggcgcgagttccgaggtccaaatggcgattgccgatgtgagcgtcgcatctctccctaattcatcatttctgcacttgactggcagtctatatcattcataatggctccacgcgaggagctgattgcctcagctgtaagttgtctagtgacacaatgtctattaccatcgttcggggccacagctaactcatgcgtccgctagattacctgtatgggctacgaggcacacaacttgatgtgtaatgatagctgactttatctagtcctccaggatccgtccgttgcatcctcgcccattgaaaaaagagtctcatttctccaatctaagaacttgactcaagaggaagtgaacatcgccttatcgcgagtgggcgaagacccgtctgccgtggctgcagctacagcttcggcatcgtccccggcgcctagctactcttcacagccagttccttaccggcaaccacagcctccccaaggatatggctatcctccatataatcaatggcagccgcctcctgagtacgtttgactatcgattgtcgcatggtgttcgagactaatcacatgaaaaggccacccaagagagattggcgtgactggtttattatggcaacagtggtgggtggggttggttacgggttgtatactgtcacaaaggtatccagtggtcccctctcttaaattaatggcgctgatcaatctatccagcgatatatcgcacccttgatcgccccaccgactcctccgcagttggaacaagataaagaaaacattgacgagcagttctcacgtgcatttactctgatcgaacaattatccaccgacactgctgcattgaagaccgccgaggaagcccgtaccgagcgcttggatagggctctcaaggacgtagagagtctcgttgctgatctgaagaactcatctcgccgaagagatgatgagactcgtcgcattagtgacgaggtgaagtcattgaaggatgccattcccaaggcccttgagggtgcccgggaaggcaatgagaaccgactgaaggagctcggaaccgagctcaaaagcttgaagacccttctgggcaaccgacttggtggtggcggagctactcctgttgctggcaggacccttggatctactccattccctagcactcgcccggcaccggaagagacccccgccacttccactcctgctgccaccaacggtttggctgctactgtgactccagccgaacaggagccaactcaggcagctgccccagcaagcacaatccagagccccaaccccctctcgcagcttggtcggtctgccgcctccatcccggcatggcaaatggctgcggccaaccggtctaaggccacttcgcactcgagtgcacctgccacacctgctgaaaacaccgctagcccgagcctggagcagagcgctcctactagttaaagttgaactgggtttgctaaattattgaatgctgtatacctctcgacctagtgtatttatcacaatgaagggtttcccttgcatgagaaggtcgctccgtagtatagcattttctattccaatatgaatttgtagtcgaaatcaacgagattgggatgaagaaccttggaatgcgctagaatcgaaaacccggggactggccgaaccgataaggcgaccgtcttatcaccccagacgataatctcctccaaactttccagaaactctcaacttcagaagaaacagccaaaatgccttcgccaactcgctcatcgcaccgagctacctctccttctgcaccaagctcaagccgccatcaccgcagccgccacagccattcccaccgccatcggcatcgcgagagctcgcgctcgcgctctccgcaccgatcagacagacaccgatcagaccgtcaccaccgccatagcgaagacaaagaccgcaggcaccatgagcgacgacacagagacgctccagcgaaaccagtcgtgcttccttaccaagcgcgtgcgctatcagggcgcgacctgaaggtttatgaacccatgtttggcatgtacttggatatccaaaaaggaaaatatatcgaagacttgagtgaagatgaagtgaaagggcggtggaagagttttacgcaaaaatggtaggccgaaggtattctttgcttggcgcgatgattactgacatcgcaggaatcgtggagagctcgcagaaggatggtatgatcccgttacactagacaaagcacgtcagcatgcagaggaggaaccgacagctggcccaagaggcggacgcgaatcgcccgattatacgcagggccagcgagcgactggtgaaaccctacaggatccgccaataggcgatgacgatgatgaggaggatggggatgacgagtacgggcctagtctgccaaaagctggctcagggagaggtggcccccgagcgggccctgcaatcccaactatgcaagatctcgagctcaaaagaggtacgcttttctacttcccctaaatatggccagtgtgctgacctccaaccagaatctgctattgagaatgccatcgctgcccgcggagagtcacgcgatcaataccgtgctgaaatccgtacacataaatctacgatgcgccagatcgaagatgaaattgcaccgcgggctgagccaggcacacgggagagacagctcgagaagcgacgagaacttgcttcgagtaatcgtgcattcgcggacgcgcgtggtggttcgcccgaaggagctcctgatgaagacttaatgggcgcaggcaatgatttctctgccttgaaaaaggagaaggagaaagaccaacgtaaaaagaacgatcgtgagatccggagagaggagatccttcgtgcgcgtacagcggagcgagaagagcgtgcccaggcgtatcgacaaaaggagcaagagacgatgggcttcttgcaagctctggcaaagcagcgatttggttgaagataagaaatgtcgtgtgcacatgcgcctttgatcttaatatcctatagtcttcactcttaggtccataaagcaataataaatacgatttgcatgccatactctctcagtcgtccgctccagcggaacggtccgacaccgccgtcggagtgactccgaggtatctaggccatatatgatcttccctggataatacccagactactataaacccagcatgttcaaacaactatatcgcctaccatgccggtcaacattgacaccattagcacccggtagccggcggtatttccagaccaaaaggcaaaactccctaccagccgcatactaccgcggcggcacctcacgcgcagtcttcttcaagcaagaagacctacccccgaacaaggaagactgggctcccatattccgcagtgtcatcggtagtccagatcccaatggccgacagctagacggattggggggtggaatatccagcctctcaaaggtatgcgtagtcggtgcatcgacacacgacgaagccgatgtcgattacaccttcgtctcactcggtatcaaaaacaccgacgtcgactactccagtaattgcgggaacatgagttccgccgtcggccccttcgcagtcgatgcacatctgttcccattacaaaatcccagcccggattcagcctcggtacgcatccacaacaccaacaccggcaagatcattcattcgtccttccccgttgtcgacggcgaggctactgcgagcggtgattttgctatagacggtgtcgctggtacagctgcccgcatcaagctcgacttcatcgaccccgccggctcggtcacggggaaactcctgcctaccggaaacgtcgtcgatacctttgacgctaccaaagctacgtgcatcgacgtcgggaatccgtgtgtcttcgtgcaggcgctcgatctcggcgtgagtgggaatttgactcctgatgagatcactgctcatccggatttgttgccgcgcttggactccattcgtcggcaggcgggcgttaagatgggtattgcggatgagactgcggcagttcctggtagtattcctaagatctgtatcgtggctgctccttctactaccgattctagagatatcgagcggaggcagacgtctgttgatgttgatcttctggctcgtgcgctttctgttggacagccgcataaggcggtcccgattactgtcgcgttggctcttgctgctgctgttcatgtgccgcagagtacagtggctggcgttgtgagtgaggatcctgtcgatagcgctgggcttactattggtcatgccagtgggaatctgttggttggtgccaacttcgatgcagatggcgcgttaacttctgccacggtctttcgtacagcacgtcgtttgttcgagggacgtatttactggaagaacgataactgagcgggtgaatgatgttcgattgtacaatataattggcaggaagagtacatgcacacatgtatagccggctgaaacaactgaaaagaaagacctgatcatatgagatatgcaaataaaaacttttattcttgtgcttcacaagtggtatatctatatcatgatctatccccagctttaagcatgtctgccgagatcaatatcagcaaccagcttcatatcatcagtaccagccccgtcacccagcccaaagaacggcttgacagcaacatcaaccacctcctcaaacaaacgcccaataacagcctccttcagatcctcaccagtctgcgcgaaatccgggtacgcgttgagctccagcagccacacattcccaagagcgtcaacgaggaaatcaacaccaaacagctcaaacgcattgggcagagtctggaaatgaaccatcataccgcgggccgcagcctcaaacacctcaccggtcaccgagcagatctgatcaaaaatcttctccttccagtctgcactgaaaccggggacgtggtggtcgagatcccagaagcggcgcacactatccttgttcgagctgccgccttcctggaaacaggtgttggtcagatggcgcgcgaggtcggcgacgtcgtactcttcatgcggagcgcagtagcccttcgcagcgaagagcgcgagcatctccttgaagacgtagactttgagtgatcccgaggcgaggacataggtgcggatgtggaatttacggtttgaggatgacgggaggaggagaggtgggtcaatatagggctgtacgaggaagtggcggagctgcgaagtgacgatccctgtgtctagggcggcgctgccgtcattcgcgtcgtcgccatttctctcggatccgctctcgtcgtctgagtcttcttcccactcctcgaagatctcgcgtagctggtcttcgctgttgaagatgcggattccctggcctcgatcgctcatgccgggcttgaggatccaccattccttttcggagtcaggtcgatcttcgttcttagctaagctgtcgttcaactcgaatgcttctagcagggcgtcgtcgaggaattcggcataatcgagttcgaagtcgaaggcgggcttgaagtggtgtcgaagagcgctctctgggtgtttcgagatccaattggccactgtgtttgagagatagtgcttgcgaattaaagctttccggatgatgtacgcgcttgaaagagacgtcgagggcctggacatgatatgctcgaaatcgaggcgctcatattcccggtactggaaaaatggcgcagatgagtccggcagctcggacacagaagacacacgcttgaaggcacttcccaggcgacatgttaatgcccgttcaaccatttcttgcacgtaggagttatcgcagtcgacgagggagtacaacgagggcggattagccgatctacaagatctccgtctatcagaaagggtgccaatacttaaagaaaatcaaatcaaaggggaggggatatagtatctaacagctaagccagatatctaaggtgggtgcaacatatagatttcggatagaaccctccataccatgcatggcgtcaaagtcgtcactcacagcttaatctcccccgaaataccgggcgcgggcatgaaattggccctgaggggcgtgacgctgtaaaagtcagtcgatgtccaaaagtaagagggcattgaacaaacctagtcatttgctccttaacagtccagccatcattgccaggctcactttcctccacacttcggtaaacatcctggaaactcggtgcccacttgaaatgcttgtgctgaattccggatggcttctggctgttaccgacaatctgatctggttgctttcctgccatttcgccttcgttgcgtagttgctcttcttgcaaatcagggtcgtctgcgggtgtggggtcgacagcctggaagcaactcccggatgtccacgtgttctgcagcatgtcggtatataagaccttgttcttactaacaccgggttcgaggggaacattgacgctatagaggtgcaccccatctgcccagttcgcgcaaagatgctcaatcaacttgactgaatggcccgcggcctctgcgatgataacagggtcatggtttcgagagctgaaagcatacgacagagcaattgagcgcttgccacagcaggcaccttccaacgctgcgccaatggttccgctcgacaatgcgaataatgccgttgtgttgcgaccatagttcggaccggagacaatcacatcgacagggccatgttctttaaagtagtggtataggccgatctggacacagctcgcgggagttgagtcgatcaaaatccactcttcgccttcgtcgtgttcaccatcactgccacggggcaggttgtgtgttgtcccgtcttcttgatggagcgtgccgggccggaagtaggtaggtttgacagaggcgcctaccatgtgcgctttacctatccatgatcgttgctggtgtggtagaatgaccgagaccgtatgacctgcggactggagcgagcggacaagcgaatgcacgtacggcgatgactggtttgacggaggaccgtcgtcgttggtgacctagatagagataagtcttcaagctgacattgcagtatctatatctgcttaccaggatatgcatttggggtgaagtggttgagatgtgaaggatggaggggaagaaagttcccccccgctttgcgttgtcgcaatcggcccagatgatccacaatgtcattcccactatcataagacattacaacatatagtaccattcagctcagctaggccaatgaaaacacatcattgtgattgtgtcaaatgactgcgccgtctctgtactccacgagcttctgcgctttctagtccagagcctgtaccagcttcatcaacatcagccggatagcttgagagcaacctcctctcctgctcgggctcttcctttttgacatcggaagattcatcagaagtattcccgtcctcggactcttctttgatagagtcctgcggctcctccttgatctcattcttaggcatagtcccccaaatccaagtcatggccagccacgtcaagccagcagagacaatagagaccgaccagaacaaagagctgaaaacaacaaaagacgtaatcttccaataatacataatccatctatcatctgttagccatatcccacaaaccacctaatccccaagaagacctacctaagccctgtaagcctagcacggaactccacccgggcagtgtaaatctgcatgtccgagtaactttggatctccagcctcagactctgcggcaagttctgcgcccccttcgcaaactcaagctgctccatcatcggcacctccagtgtctccgactcccggcgccagccaacaacatagagcggcatacgcgccactctccgggcaacatctaccagcggcgaagcataagtcatgatagcagggcggcgggcctgcgagatcggggcgctattcgggccgagtaagagggatgaggcggggcgggatgagaagagggtgaggtcgagcatgaagttgcctgtatcgaggtttgagggtgtgcgtgggagctcgagcgtcacggatacgtcgtagggctgaagagccacaaattccgagtcaaaggttgctgtaccccaggggttgccatcgcttgcacaagttagttgagctgggtgtctttgtggggaatgttgttatacccaaattgtagatggacttcgcgttgtagtccgaccgtgggaataaatttaaaataaaaaaccccgtaggcaattgcggagatgcctattaggaatgatgcggcgcccatgaacaacagcgtgttcaggtatagccgtaaggcggacttggataccagcgcgcggaacggcgcgaggatcgcctcctgtcttgtgtcagttgcagctgagaaatatgcatcaatacacccaccatgatgatttccctgacagaagatgggccatattcggactcgtctccaaattctgagtccgccattgtaggagtagttggcagaaacaacattccgaaattggaagttgaggtcatcctgttatctccgttatctacaccgaggtctgcgtccaagcttcatatatgcctacgataatatttaccaactcctagccctttatttagtaattgtccagtgatggcatgtctgacagagctaaacatccactggttaccgcagatttacagtagagaagttctatttcttcattgtgctgtcaataaagttgtatacctacatttgtatataaacgagaccttcggggctcatgtagggatacctagattaagtctagagcggagtgctagtttgacgataagcgacaaaagaagatgtggttcattatactagaaaacgccatacggaaggcccaaaaagaagctacaatgatcataagaatagtaaattagcatcgccccatgcagataatgaagacaccgccaactccagcttttacagtcttatcattacaggtcgcgggcagcatgagacgcgaaaaatatcatggaacctcaagtcatgcgaaaatcgtaagagaaaaataaatatgcatgccatcaccacggctaacccctgccgtaacatgaaactgaaaggatagaatggcaaaaaacgcaaaagagcaattgcggaagagaacccgtgaaaattacatgcaacaaagtactcctgtgccgcccgagttatcagaaagaacttgaggagagacatgaatggagaggatgaggaggagaagccaggaggggcttaggcgatgggccgagggctctgttgttggatatgttggagaagagcgtcgaaaagacgaccgatctagagagttatttagtatcgcgacactgtggaagattggtggtaagcttacctcaggtgccgcctgaatgaaggggaggcggaagaatgagtagctccggttctggaggagctcctgcagggtgatgatcagaccccatggatgcgggcggtgcacaatcagtcgctccaacaatacgcgaatgatttgttggcggatatccgagtcatcttgctcagagtaatccacaccaaacagacggagaatagtgaagctgaagaagtaggtgtggctgttggggtagcggagctggttggccattgcactgagtaagtagtagcgactttcaggacgcagaacttgggcgatcttctccagaagagcagcgtgagtcgagttctcaaaggcgctgcgggtattgcccttggaggcatgctccactgcagcttgttggccaatatacaaaacaagcgcgttgactaggacgacatccacgtcgacggggacaaagaggaggccagtttccttgaattcggggttaagaatggcgtcacagagctgctgaacagcagaatcggagatgttgtcattctggagtacatcatcaacaacgtccttgatgttggcaagctgcaaaggagcaacgatatcaccggcgatcttgggaatttcccgcatctcctcgatacgctcgaccttcaatccttcgcggaaaggatcgggaagtttctggaacgacgaggggtaggcactgagaacaagattgcggagctgagcgcaatgagccgggatcacattgcagaactggaaatggttctcagccacgaactcggggaaatcgtggtgcagaatcagcaagatacggagaacgcccttgtataggtccttggcaacgtaggtaatgttggcagcctttaattgctcgcccatgtaggatagcaatgcttggatgatctcgcagtaaggcgcccatcctgcacgatcaggcatgttgagcatgtcagacatgaacacgcggtgagagactaagcaaagccagccataaacgaacccgggcacgtaacggggctggaaggagaggaatttgttggccaaggcgaagatcattccctggtgctgctcagtgtgctggaggccgttcatagagtactcgcacagaatactcgagaagagacggaagaatacacgctggttgaaagcttctcctctcatgacctggtggtgattgaggaccagaaccaagagagacagaatagagttgaagtacgtagccttactagctttgacggcgccagcggtctcgccctggaatctgacgagaagaatcacgagcttagcgagggcatcgatgtaaaggaaggcctcatcaaggctgccgccgttggggttctgagactcatgctcaaacatggcgacggaaatgtcgatgctgagacggaaaaatagtgctgagtcctcctggctgttcatcacttggcggttgtggaggtcctgtaggaaagagtggaaggtgcggtcagtggcaccgggggccttgtaaataccgatccactcgctgaagatgtactccatttggtctcgcttggacctggcttggtctgtaaggagagagttgatgacctcgggaataccggactcgcgcagctttcgcacgatttcgagaccgggagcaacgcttccatcctcagcaagccattggctcatagcatctagactgccggagaagtctgatcgaagtgccgatggttcttcgttgaaaagaacgcgatccatcaggttgcccagcaactccaaagcaggaacattcctagatagaatgagtcgggtcaggttcgtatcgacccgacggatgtctaggaggcctgcgtcgatgagagcaacggtgaccggcacattgaacatgtgctcatcatcaacttcggaaagcagtgcccacgtgtaccgggcaatgagactggacatatcgcatagcttggcaagcaggtgcacaaggacctcaatctcgagggatccatgtggctgggaatacaaaagggtgcaaaccttcaaagaggttagtcgcgccaactcctctccattcgtcgaggcaaggatgctgcgcagtgcctggttgtattcttgaagaactgcactatctctgccaagatccttgacgtgttcttcaggggcgctgcgagcagactgctggagatcggagacgaggctttccactctttcccgggggctttgagcatcaaggaacccattagtctggactgggggcatttgagaaacagcaggctgtgtctggggagttctgtgaggaatggctggctgctcagccggggtagaaaggtttggaatagcaggataggattccccaagcacgtcggggagctgacggccggccgatgcatcagtggatggcgccgggcctcgggattgacgggcaaactcttcgtagatggcgagttgctccttgttgagacccccaggcgtttgccggtaaggctccggaatgaacaatccccaacggttcattgaaggatcaatgaaaggatcgttagaacgactggccagatggcgacgacgagcctccaattgaggctcaatcaccttctcgatctcgggcagggacttttcctctgcagctttctcgacaatgccacaggcagcatccaggttatcgttgacacacatcagaatcaagccttcgggcataggctgctcggagtactcttgctgaatcatgcggatatagttagtcatgctaaccttcagaggctctttgcaggtgacgagtgccaggctaccagcaagttgtcggaccatgatgcccgcggcgtggcgcacgcgttcctcatcgggttccatggcaaagtccttggagacaagttgtacggtggagatggatgcgatggtcacagaacgctcgactacgggggtaatgatctcggcaatggcgcgctcgactgcagtatgcacaatctgtttaagaattgtaggatcgaccatgctgctcgccgatgagggcaggacaaggatcttgtcaagacttggcagtgttgacatgatggcggcgggggacaatctctcattccggatggctgggttaatagcgctgagtgacaagtcttcaaatggctcaagaccttccggagcgttaacagttgacagttgttcctcggcatgtgcagcacgatcgcgaatgacgattgccggctcaattgtcttatggtcgagatcaagatctttacagagaacttcgatttcaaacttgagattgagctttagttcggcgaaatgataaagctccaacagcaggcccaaaatatccatcagccaggggttgggtggtttgaagactgtggatttggtagcctgcacaagaactttgcaggtgaaggggattgtaaccatgaggcgttgagtgtcgtatccttcgaggagcaagcccttgaagtagatgttcttatgcttaataggtttgtctttggcaatagtcagtgagccaagccaagcaccaaggttcttcaggtggccgcgatcggtagacgaggttaaggtgccttctgagttaatcaacttagcgacactaacataggtctcccgtaagacctcagcccagaggatcttgtcaccaatgcgcccaagaagatcaagatagagctgctggaaattaggctgcaacttggcacgttcttccaccaggtatgcggcgaaccactggtggtgctggtcacgcaacacttctcgtagatcttcaagtttctcgtcaatgttctgctcggaaacattgttaagaacgaaaagaatcttgtcttgaatgtcttcatccggttcttcgtagagctcagatcgaagaggtgggtcgagttgaacagcacggaacttgcgcacggagccatcagcgatgggggagtcaacagaattgccattggtcaaaggcacagaagcaagaccatcgaatggtcctgcctccgcttcgccaatctggtttccctgttcacggagcacctcctctgccttttggtatatgggtgtgccttggagagaggggatttggaagagcaggtggcagaaaccagcccactcgggaagacggttaatcaactgttcaatcgcttccacgccgaacttgtacatcgggtcatgaggctcatgctcgcggacagcctcgaggatcataccgagaccgaccttcagcgtgatgccatcaacaagacggaagttgattatgccaccgaacatgaccgcagtcttcgtgagagcctcgagcgggtattcatggtagcaatggtattcgtcaaccaggccgtgcaccatgcaggcgaacagatcttgttctgtggggtcgcgcgaagacttgtatttgcgcatcaactccagcatctcacgcagcgagagttcctcgtggtacattttaccaaagagctcttgcatttgcttgtcaattgactcaggcaacgtgttaccgttctcgccattggcgtcgattatatcatcgaatccttcgccgtagttgatcagacgaggatacgtctggatgcaaatgcgctggacaggggtgagattttcgcggtccccgacgtattcctccaatacagacaaaagcgtataaacagttttgactgcgaggctgaccatttgatgagcagactgctccttccgttggacgtgcaattcgtcctcggccttgattcgcaggaacttagagagcagaccacccatatcaatagcgcctttctgtgcggcattccgaacccactgctcaagatcaaagggactcttgcggtgggagtagcaggcgagatcgagggcaagaccgttagtgaacccaaggagataatcgagccatccgtatgctgcagcgtgctcatagatcacagcggtggaggtgggatcctgagtgaatgtggtgaaaagttgttctgatacccactgtcgttcttgtctccaagcaccttggagagcgagctggtacccatcctcttgcttcgagatgaagacaatgaatgtgcgcaagacaaagctctgctggacactggtccacggctgcggaatagccagagcagaaacgaggaaaaccggcaaatcaaactgaacgaccgcctttataaggagctggctttctgtcgcagcccacgaagcctgggagaacaaggcaaggtcgaaaattgccttcatagcgtccatggaccgaagaggtgactttgccgcacgctcgccttgcaatttgacgatttcaggggcatcttcaaagaagtcagtggggaaagttgcgcgaagattagggatgtgcgatgggtcgatccgagaggccacaaaagctgttaggaatgacatctgcgtgtcacgatgctcccagtctccaccccaaagcttttgaacatccaaagaggagtcgtcgaccgacatggcggaaagaacattgtacaacttggtgaattgtttcggatccactctgaggccctcacgatcgaagtggcggaacacgaggggccagtttattggcttgtcgttatatgcacttaagaatgtctctagtgagaattgttcccaatattgcgacaagatcatgaagagaagggcgctggctagatgttcttcgctccaattcctctggtctgaatttagcaattcacttattgtctcggtatgcgcagtggcacgagctcccttggcatgaagctgtcgtacaaggacatattgagggttcacaaaattgaacatctgtaaagcagaggaaacttcgaatggcatatccaagccaagtttttggaatcgcagattggctgcgtaaaccagcttcgccttgacatcgtcggtaaaattgcggggagggtataagataaaacgttcaatcgtcatgccaaggaaggagttgctgtaatccttagtcacttcggtaggactcgccaagctctgtaagaaaggggcaatggaattcgagaggatggcatcggctaatgaggatggttagatcgacccagaggcgtagataggagcaaacatacctttagcacgaagatctgacttgctagtcagtttgaaggccaatgcaagggaaaccttgacaactggatcgagtcggaaatgatctaggaaagtggaaaggtcgaagtcgcggaagatatctccttcggaagtatctactgtctcggcgattttctgagactgctccatgtccgaggacactttctgcatctcctggacaaggagagggtagttgcccgcattttcaacggatttgttaacaccggggaagatttgaggcgcatttcctgttaggaggcggcgaaagtatttggaaaagacctccattccgttcgaagtcacaagctgcggttattagaatcgactggattgggatatacggaaggaccaccaaccttgtgtatctgggcagcctttgtctcccacttctcttttccttccttctccgtaatagaatccagtaacaagaacacctgggcaatagatattttggtgagcgacgattggctcgagtgggcgtttgtagaacccggcttgtcagaagcaaaacctgtgggagaattcacggttgttccggacgagagcggcgaaaagacgcctcgggaagatcccggcccaccacctcctcccccagttcctcctccacccggggcggagcctgtagcagaggccaaatgggaccctatagaaggggtgtgagctcggaatttaggggacgaaagggttgttgcgtgctgttgcgagccagattgcaatgatgtgaagggcgaagacgtgtgtttgggacttccaccagagagacccctagcagagctcagcacggcggagaaagaagatggtgtcgaaaccccaaggcctgcgtccaagccccgggaagccgtggggggagcggcggaggatatgttggtcgcgagtggagtcaacccacgacgtgcgccggactgcgacacggaccgaccccaggcaccaatatcggtcctggtcgaagaagatttatcggtgccagaagcaatcgacgattgggcggaagggtgagggggagggaaggtcatctaggagacgcgatcatttgatctcgaggtccaaagacagatttttaagtcacaggcgcaataaacggggggaaatcgatagagcagatcaataaaatagacgcgagatcgtgcgatatcgagagagggagggtgtcgggaaagtaggataacactgtgggagaggaatggatgggggaacgatgagatggagaggttgcgagaggaatggggtgcaaggtgcgagttgtcggaagtgtgcctgcctcaggtgtcgagtgggagctcccaatcaggcaccaaagtgcgatacaaggtacgccttgcggtcgttcgagtgtggaagaattgctgaagctataacctgtttaagacttgatgaatgtgtggtttttgctccccttgctgttcattgcccatccttctcccacctacatgctggtgtttggagatggtcacgtgcaatgtcccctgcacgtgatgtatggctgagtcatctactctggggtccacctgccgctgcacgggtccgtgaatgtaccctaatgaagcaagacctagagcaggtgctatggagagtaatctgagcacagcccgaggatattcgagtatgtatgtatttacaatgtaggagcatgtaatatgtcttcaaagtgagcaaggggttttcaatgatttatgctatgtcatcctacacagcaagctaatttgtctatcctgcaatatgatggatatgatgatagaactgcttcgtcgttaatgctaagataggtaaaattcaacctagcatcttacgaatatagtaaatgagaacgatatatgatcaagcatatcgcaggacctgaaccgtaccaatccaatgaacgcctgagttaaaatccagtaagaagagccgatcaacagatagagcaaatataacccagaaaaatatgaaagaataacccgcaaagtgatcagagtcatgtcatgccgcaatgacagtcagcaaaaatggcgggggcataggaacggatgatgcaagaaacgaagcatcccacaaggccagtagcttgtggggacggaaggaagataaaatcacacagtcaagaaggaatacgatcatgtgcacatgagtttgagaccagttcgctggccaatccaacgccaacgcctaggtccaccgcagaagagaccacaatgaataaatgatattgtttcaggttgagtccggctagtcagtcagagacacacagtagcacgggctagcgtaagatgcctgggcagtgtatgtctgggcagtgccgcctttataattggtgtaggtagtagtcggcgtgggctcgttctctttgatgttgatgatgctgcctgagagaagcgccaaacccccgtcattgcgaacttgcatttgctgacagtagggagattctcgtgatgggtcgtctcggcgctcctccatcttaatcctgcgtggataagcgtaggtggcggaggagtcgcgtttagcgtcagcagtggagccagctgtgcttgctgccatgttgctgttgatagaagcagtggtgctcaaggaactcgacgtcgactggttgacgtacaagaaaaactccatcattgtgttattccaccaacaaaaccacggcttgtcgccaatttctgcggtctgcttcaaattcttgtaggcatttgcatttgcccatccgtcttccacgaatgtgcgcttagaaatggagttagagaatgtatcgtccggaacaatgaccaacttgtcgaagggagcaaggaagaacagagcaggacccatgccaatatcagtggtatcaatggccatactcaatgcttgtgtaggcgaagaagaccaatacggcgcctgggcaccatatgtaaaggtcggggtcggaacaccgtcgtcgaaaacgatggaatggtggccattggattcgccgataaaaatatcgattgtgctcggtgattgcatgcatttccaggctttgccgtaattcgattcgtccacgcaaagcccagatccattctggtaaccggaaggtaccgtgtagtagcccgtagggactcccttgagacctgtgggggtggatatcattgacgcatccatctgaggggttgcggtgaccgttatgattggtaaagggctggattgttgggcctcctggtgttcttgctttgcagcttctgcggctttcttggttcccagaacaccaccaatgacgcctccaatacatcctccaatgagcataacagttgcaatgaggaccaacgtccatactggcaggccacagcatgcggtctgtttccccttgcgtttaagcttctcttcgaaggccatgatgcctgtggtcgcagcgactctttcctccccgtgcccattatcgttcccatcaccagaatgttcaagcaccaaagcccttgatgaggtttctgaaatcggcgccgctcttgaactttcattgttgagacggtgttcctccggcggaggatcgagatcgactaccgtctcaggccctgggggcttcggtataacaccagttggatagcgtgaatacggtggtagcggctctgtgtgaccatccggtccaatgatatcacccacatcatcagcctggcgaccagcgggtggttgatatggtgggttatggcctggaaatccgactgggatgatatcgtcatccattccttcttcgaccacattttgcgagtacatcgcgtaggggtgctgcggaccggttgacccttcaagtgggcgttcaattgggcggatcgtcgaagtactacctacactgggcgaccggctaaccccaacttgtggatacataccatatggatggctgggtccggtggctccggtgtaggggctcagagcgcggggaatcgagaaacgagaagaaacgctctgattgcgctggatcatagaaggcgtcgagttgagagaggaggttgagttacggttgttggcgaaagcataccccttttgaggcagacttgaccgatgaggttcatcgaaggacacccgagcgtcatcagcgaacgggttatcgttctcggtcgggcccgtgctaacagcccttggctgggtgttttcccgaagagtagaggaggatgcaatggaagagggactgtgggggcgttcaatgcgatcggagtcaatggtttctaatgagtattcgtcggcgaagacatttggattggaggtggaggtgcgaccgaaggagcggcgaggtgtcgaatcgctggagagttgtggcgtttgagaggattgtgaaatagagcgagaatgctccgatgaaatatgaccagacatttccctatcggtctggcagccctgtcgggccacctcgttgtttgatcaatccgtttcgctacccgggcgaggatgggcgaagaatgggcggcagcaagcagatatagcagactctgtcgagatgttgaggaggaggaggaggaggaggatgttgatagatgatcgagatagaatgtaggatgagaaacttcaaattggggaaccctggaagggaagggaggagtttgagactttagtgtgaccagtttactgaggggagccgggggagagtcaactctcgggccaactgaaattcttggctttttgattttgcaccgtcttgggggcttttttccatggactctttctttttcttttctttcttctcaaacattctcttgtatcctggtatcacataccctacgatctactccgtgcctgggactcctctgtttgcgctactacgactagggtgaccaactagcgagcacttcccgtctacggtgggcctgaatgggcttcgccaccctgcatgctagtatagtgtgctattttgatattctcgagtatctgccagtacacagaatacagaatacagggttccaggtccctgttctagaccaaagctctaaggttgtttgcttctgcatgcgttggatttgaaacgttttctttctcgccacgcaaccacgtgagaacccctttgtgtgtttgggtctggaatggaatccactgaactggagaactgcaccttcagggcctccagtctgggcctccagtctgggttcgcgaaaaattccagaatacggaaggtttaaaacatcagggctgagcggatatctcggacttgcaaactataatcgtaaaccgggaaatgcacaattgctcatcatcatgactttgatatgagctgatggtcctaggacgtctcctatggacagatcttgtagcgaaaacaagggtctctttgaatgtaacgatgttggcgtaggtaaatacctgtgttcgatctcggataattacgattggagtatcttggctctacctaggacttgcagattatcaaacaccgcatccatggaagactcccacccagaaaggttacgatattcgctctcaacagagatgtcccgaacaatgaccgtatggatcaacggtttcagggccgttcagggcttcttcggtccagcccctctggaacgagattgcgtgcgtaacgggatccatccagggccaaccccatctgactccatctgactccatctgatactgagatcgggttttatttccgtctggtccctatgtatgtaagaacatcccagagaacatgagatggttccttggactgatcataagcctccaggacttgatctagatctataatatcgtacaattcggtatgcaggtcacatgtcatgtgggacatcaaagaactccccatgttctccttctgtatcagcagataccagaaatttacttcataaattgacatatgttgaaacgatactgtgtagctaatggaatgatcattgatagcctacgtagatactatacaaaccttcatcaaccatatttccctgccaagaattgcataacatatcgcgaggaggcaaagtacaaatcagctacattccaatgaaacaaacctgattcaaatgcttaaggatgtaaaaacatgcaatgggtgattgatcggtctacaaggttttcggccccatagggtcaatatgctatcggctaatagccgacgcatcttatcagaccgatacatcaacatgactcaggaaatccgtcgttacatcccatgacatattcagcttgacacaagccgaacagcgtaggacctctcggagatatatatctacacatgttcttcgtcctaggagtatgtgaatcctgtgacttggtgtacattgagaactcaatatctcgattcagtatatatcctcagtcattatcgtattactagcattatagttaactaactagatacttcaattgacataaagaatcatgattcttaactaactaactagagcacccgggtgttagtgatagttttggcgcactgtgggttcgccaagccacagaccggttatgggcttggccgtctccaggtggcacagacctcatctattccctccttcggtcagccaacattttcatttaatcttttccttattgtttttgaacggcgaatttcttcggagactccccattgctacaagcgtatcacaaattctctgtatccgcaaaccatcggtctgttccgggcagtctgccatgtttggtcctcccatcatttgtccaccagtccaaaagcattccgcgaagaattcttccaaaatacatcacgatgatggatgtaagtgaagcctatcaaaggctttaattacaaaccctgaatatagttagattcaacgaggtcaaccgtttagaggaacgatatgtctagtttcgaccaacagagctccaacggatcgccggcgaagtattacaacagggctattgccccaatgtcaataagcacgctggacagactatatatcagtccccaaagaaactccacagggcttacagcctcgaagttgtggatttttgtcactgcctcattgccgcaaatcatcctctatgcatcgcagcacaactcgcggtcataccgtatctcttatagtgagcgtgaaagcacctctctacgtaattatattcttctccatcttaggcgtagtatttatatatcgagcacaccgcatctactttcgtgagcttcaactattctagtcttccagtcgacgaagcacatcgcgttgagcttctccagcttgatctacggagcctgctacgccttcgcgtttcagttcctttcctcgctctcgctatgattttttgcccggcttctcctatcccgttctcgaatacttagacgcagacaacattatctgcgggagtctctaggagccgatacatttcttgcctcgatcgcggaagcacgtatattagccaatggggtttcctaaagagggcttactcacacaaatcagggggatgtttatctttgatttcaaggtccgggagtctatattaagaaaaatatatctttcatttcctatctaatcccccttactcttcttccaatcccggtactcagcgataataaaatatatctgtgcagcgtattgtgctatcacccatctctaggcaactgattagcgatgttttttaagcattggtatagtgatcatgatcaaacctaccttctaagtcgattatttgaactcttggttcctttgacccttgaataccgagagttgtagtaatccatggtagtatttcaagtcccttttgcatcaatacttcttttaccaaattcgattacagagccctaacttcaagtaggacgggatctaccagaccaccgtcgtgcttaacggagccgtaactgcggccaatactctgggagactccacatgtgttccatatttcgcgggacgtcgcaatgattcgcgatctcactctggccatccgtctgcgggtggtagacagttgacaattttgattcctaggatgcgacagaattccgtccagaattcggagataaactgaccgcctcaatctgagacgatagtctcggggattccagtgattcgtatgacattgtccatgaataaacgggccatttgcttcgcattggtatccttatggcatgggatagatacgggtctcttgcttaaccggtgaacaacgacgaataccgcgtcggctgccatagtagtgtggttgaaatttgggagataccagagagatatgccgtagtgatgagggtgactcgtacaccaggcttaaacataccttaagcttcacgatgcatagaccctttttcatattcccataatttaaaagcaaatgaaagtttgagagtccgtggcaaaagataaagaggagaaggggtgccgaagttttcttggacagcttagaagccctcttcatttccattaaaaactggtcgatcattctcgctgggctaactacagctgcaggcgaaagtccctcgctgtccaggagttggcttaggcatacttttcgttcctcatagttgtcgacagggttggtgacgctggccaagctacagacaatagtcgaatgatatactgtaacttaagcagtatttttgatgtagatgagagggaaaagaagagcaatcagagagtagaatcaacaaagtcggtatttatagatgggacaggtactatctacactagtagcaataggttatctaggcactcgaggtagtgtgagtctggaaggtgctaagatgtaactcgtgagtgggcaagaagtgagaaagaagggattgaaatcatataggtattaagaatagttttcttatgttttaggtctcatgctactttgttagcatcatggcgatgtgacacagatatcaccatcctaggattttaccttactgttgccgactcaaggcttacttggcaacttagtaatcgagtgttgtcgatggcgtgaattgatcgaatgcgatggaagatagcaaaaggagagtgcaataaagttgatcggtattagtggcctctaactagaaagagtacgtaccggatcctaaatgaaatagaaagggtagtgtggccagtctactcaaaagagaaagagtgatgagttgaataaggagcacccttggaatttattactcaggttgcgaatacataaaatgaattccatgtttcccatccatatcatcccttcaactccgatgtactctgtacatatctctctggctttgagcaacatttttcagtaccataataatttaactttcaattttcctaaatttgatatataggggtagagtcccttatcaacaaccaattagtgagaatggaaattaagcaataacgcggttgttgaaatatgagattgtagttatggatgtgatgggccatggcagtgagatagttatgttatcgataagtactaaattaagggtattcaccgcctaccccttgagtaatagtactaccgtgcacgtgctgaagtatatagtgcccgctgattgggtaaagccccaccgcctactatagcgcaactaaggtatccggcgattatgaggtttactttcctagctcttccagcactactgtcactcatgatttttatcaaatctcttcatcctaattgtatttgaggctggctacttcctttgcagttacacttgattctcatcatgccggacgagtcgaagggaaagagcttccccgacgtctctgcgaaactctccgcgcttccaaagaaatcactttttgagcgtcaaaaagccgaagcagaggccaaacgcgcccgggaaaaagcagagacagctgctgtctatgaagaatttgtcaaatctttcgaagacgaggattcagttgcaccacagtcatgggatggaggatccaatacatttagaggcaggggtggtggtcctcccaggcgtcatttcgcaacttcctcttcacgcggcagtggtcatggatctcttgggcccccgccgccgtcactttcacacaaacgttcccacgaaactttccccccctcccgtcgtgaccatctcaaatttgaaaacgtacttaccccatctgaaaccgacagagcacttgacgaggaggagagggcagctccaaaacccacgctatacctcgcatcgcttccccccgggacatctctgtctgtgattaaggcattgatcccctcgaccctgaccgtggacaatgtcaagatcatcaccccacccggacaattgccaacccaccgcgagtcctcttctgcactcgttaccctctcaagcgactcggccgcttctaccatcgacgcagctgtaagcacgctgcagaacaaataccttggctgggggtactacctgaccctctgtcgacatctttcctccattgcaatcaattcaaacatgcctttgccctccggcctctcgtcgactactacttctcttccgtttggcgccaagcctattccgccgagtctgggcacaagcttgagtcgagctccaccaccagggccacatcgcggagggttcgcacccccaagctcgtatggaccaagcgttggtagaaatggcccaaccactcaggtgcaggtggagctaccgacagatataagacagttaagacagatacacatgactattgaaaaactcgtgaaacaaggtcctggatttgaggcattgttgatgagtcggccagaagttcagatggacgaaaagtgggcttggctgttcgatccgaggtcgcctggtggtgtatactaccggtggaaattgtggcaaataatcacagaccctaaaaagaagaatattgataagccggcaatgatcttcgaaggtggtccgctctggttacccccaaaacagcatctcaaatttgagaacgtcactcgactggaccaatttgtgtcacaccctgactacgactcctctgacgaagaacactcggatggagaaaatgaaagacggaatcttggtggagcacctcaggacggaagcaacacacgcagcgatgaacctaacttcttgaacccattgaagatggccaagcttactcatcttcttgcacgacttccgacgacccattcgaagctccgacgaggagatgttgcgcgagtcacggcattcgccatcgaccacgcggcagtgggtgcgcctgaggttgtcgacatggctattcgaaacgttttccgcccactagcttacaccggcgccaacccaaatagggaaatggaaaaaagtgccgctagactagcgaccacagataaggacaatgcaactccatccgatgaacaattggatatgtcttctgcgaagctggtcggtctctatatcatctctgatattctctcgtcgtcggcaactagtggcgttcgccatgcatggcgataccgccagctgtttgaaaacgctctccgctcacgcaaggtgtttgaacaccttggacgacttgataaggacctgaaatggggacgactgaaagcagagaagtggaagcgcagcgttggcgcccttttacatctgtgggaagggtggtgttgttttacgcaattgaaccaggagcatttcacccaagtgtttgaaaagccaccgcttacggaagcagaattacaaaagcagaaggagacagagaagaccaatgcagatcaagctgctgttgcatttgccaagagcaagagtcgatggaagacagttgatgatgagcgaggtgggaagtttgaccctactcgccctgcgaacgagaacaagctatctctatctgcccacgcagtggacgaatcggtgcatgaaaaggacggaactgctatggaaatctgtgagctgaagaatgttgatggggagttcatgcttaaggcgccactatcgggcgatcaagatacccaaaccgagattccccagacactatctcagaacccacctcagcacccaacccaacctgataaatccgaacaatcagctgggcagcaggagccagaaacacggcgacggaagccacggcccaaagctgaggacatgttcgcctcggattcggagtaaggttgggcattgtaattataccgattagcatcgaacgataccaagatacttgtaatgaatacaaatgaacataaatgaacaatgaatgagtacttgaaatgttttctctctatagacttgtgtagatagagacagttatactgaagacctgtcagttggaggctcttcagtacaacgtatcaggcagccaggcatcatcggcagaacatttcctgccccacaacccctcatcaacaaatacctttctcctttcgcgctcaacttcctgtaacctttaaatacaatcgcatcggcttttttctcttgtattccaaattcacaagttcttcataatggctggtatgtcttcctctccacttggttcctatatgcccctcctgaaggggatggaggggtctggttggatccagacagcagtgtgtgactagttgcgcaatgcgatggaaaagacgaaagaaacactgcaaacatacatatgagacactggctaacaaattgggcaatttatacagacttcaacgctattgcccgtacgttatacccacactttcctggttcatccacaaggatttagcaatgcgcctgttccccggagcctgtcctcctaggtggaaatatgcctgaagagatgggtgtcatattgtgtacaaataaccatgttctaacctctgatcgacctgtacagagcagtttgtgcagttctactaccagacctttgacggaaaccgcgctggcctggctggtctctacgtaagccccgctctcgagatattcttccaagtgtgtttatggactaatagcaattatcaattaatagcgtgaccagtctatgcttaccttcgagaccagctcggtccagggtgttactgccatcaccgagaagcttagcgttcgtcaatcccaaaggaatagcagaagaatatttcaatactgactgacttttgtgactctagactctgcccttccagaaggttcagcaccagattgctaccttcgatgcccagccctccagcggagatggcattgttgtgttggttaccggtgccctcctggtatgttgaatgcctatgacttcttctattttcttggctaatcaatttctctaccaacaggtcgatgaggagcagaagcccatgaactacacccagtgcttcaagctgcagcccgatggtgccggaagctacttcgtgctcaacgatgtcttccgtctgatctacagcgcccagtaaattatgggccccgaaacaaataccacgacgcgacgacagggtgatgtgctttcttgtgaagaggatatgccttgacggtggccgggttaagacatctgtcgttttgtcgcaagtgactcccctcaacttgcgatatgcccattgaaggattcatgaagaatttatttttttggaccatcgatcattctagaactgtatagcatttcatttctatcaagctaagatatagcacggtataaaagcaacacatagcacatttgttatacggacatcactggctctgaagcaacggcgtctcctcagatggtcgctcctcatgcacaggttcttgctgagcgctctcatcagcaggagccgactcatcgggctccccggtttgatcaacgtgcccagctttccccttgttgttggatccaaagtactcaaaatagattgccatcgtcaacaaggtaccctgcaagcaagccgtgacaacaagcacgccccagatactccagccactccaacccttacgggcagccaaactagcagcccagacaagacttccgggcgtctggatgcacatcatggggatactcaagctccccacgcaacgcagccggaaggtagtgtatatctgcgggaagtactggatcgacgcgaggatcgcagccaggataccgaggaagttagcccaggtcgcaacagcggccgggtagcgtagctcaaccgctagggaaattataattgtaacgagcgcgtgcagtagacatatccccgttacgatgagcgcggtgcggtacgtcggtccgctggaggtggaagacacactgcccaccgggtctgtgggggatgtagcgcgcgggaagtagatcacgaatagcaaaagactatgtagatatggtcagacaagctcgcgtgggtatggtatggtatggtatgggtgtgggtgttcaatcgggaattcggaatcagatataaatcagcgcttcgttcgactcacatagaaaagaaagcaagccattgcatggccatctggaatacacccagtagccctgcgaagcaagcgaatccgctgatatcccggcagcaggcgacatcttgtgcggtggatgggaataccaggatattggcgaaagctgaggtccctgatgttacacctaggaggataaagtatggtgagataccgaaggagcttcgccgggcgatgatacggatgtgttgggggaggtatgagaggaggatcccgaggataatctggctatggtacgtcagtgactggggactgattttaattctaggggcacgtacatagatagagcagtttggaagatgcctggcgaggccagctcgcggcagtagggtgttaatgagtccattgttgtgtctttataaaaggatgaagttcagatggaggtcggttgtcgggagcttgtgacgacagcgctgattaccacaattgattgcaccagttcgtcacatcggatattctgctttccacttcaccaagataagtggaattgctattttcaaagacagaaaaggaaatcctaagatatgtatcataaacttgaggacctcgttgggcactcctctcctctgtcatgttgccttgttgtcttgacgccttggtgccttggtgccttaaataggtggtgttagtctttttactatccctagttgggattagtgtcaaatgtctacaaccttatgtacatctggggaatataacatggattcattaccaccagaattgatttcccgaatgttggactacatcattcctgtcagatattcacgatctcccgacattcccctgacttcatatgccaccttgaatcgttgctagctgctacttatcgatcacctatttgtctgatccggggtacgcatctttagtcagcacctttagctgattatgtaacccacagttgagcatctgcccatttagacacttacactcataccttttgtcagtatcttattagttcacagtcctatcgctattgtgtaactagttatatgtgtactcatttctgtcatatgtcactaccgtacgggaatggcaaaataataactatggcacgctaaccgtattctgtaattcaccgtcatcagatactacaatggatgtttgtatagagctggaaatatagatacaaaagtagcatgtatacatatctacattctatacattaaataacagaaacaagctaggaattgttcccgacctggaataatgaattgatgattcatgcactcttagctcaatccaaggcaaattccccaactacgtcacttcgcaatcatccatgcttggctctttcttgcttctttctttaaaatcttgctgtgtttctattctcttcactgaaatattcatacttcacttgccaccaaaatacccctattttgtcaaacatactacaacatgaagttgaatttggccactggcctcatctgcttgctcgcttccactgaagtagtggcagcttctagctggtggaacaaggctcgtatgttgtcttgggtacaactatacccttcgcaagctaatatcatcaacagtctacaacaaatggcatgaaactgagctcgagcgatggctctccgaccatagtatggagcacttctctgtctagcagcttcaattactcacaattcacacagatattccctaccccagtcctgccgatcgccgcgatctggagaacctcgtcaagaccaactgggacagcagagtgcaaacaccccttggacaagctgtcgacaacgtcaatcatgagctacaccatgccagagaatggatttttgataggtagggtgcttacctttccttgttgtgaatgatagctaaccggtatagttggtctgactctcagttgaaggcattcctcgatcgccacggcatccctgccccccagccccgcagacacgaccttctagtcaaaaccgcgcgtgagaactatgagaagatcgctaccaaggttggccaaacggctgcctaccccggagactggctttatgcggagtggtccgactcggatctcaaggaatggctcgacgagcgtggatggccggtgcctcagccttccgagcgtgacaagctcattgcctcggttcgccgcaactcgcgcattttcagcctgcagacccagagcattgctgcatctgcatccgctgaggctgaggctgttaaggagacactgagtaatcagcttttcaatgcctggtccgactcgaagctgaaggaattccttgacgagcacaatgtcaaggtgcctcagggctcgaagcgcaatgaactcattgctctggctcggaagaaccgtcactacctttctgaccaggtgtcgagtgcctcctccgctgtagagggtgcgtttggcgctgctaccaccaaggctgggaacgaatatgcacaggctaccgattatgccaagctgaagatcgacgatgctttcgagactgcgttgaatggctggtctgactcccgcttgaaggcgttccttgatgctcgaagcgtccctgtccctcagaatggtaagcgtgatgaacttattgccaaggtccgcgccaatgcgcacaaggctgctggaggatggaaccagtacaactttgatacttgggataaagaacacctggtgtaagtacatacttgtctgctggttatgatctcactggcttacctttcctaggaactacttgtcgtccgtgaaccacaaggcgattaagcaggccgatgcctcacgcgaacagcttgtgaagagtgcccaggactcctacgccaaggcttccaaggctggcggcgaacagtacgcctctgcgacttcttccatcgcgcatgcaacagacacagccaaggatgctactttcgaccaatggtcgcactccgagctcaaggaatacctggacgactacggtgttccgacataccagggctcgagcatcaatgaacttcgagctgcggcccggcgcaacgcccattactataagtacggcactgcgagcccgcaagctacgatctacgccaaggtcatgagtgttttgcagtggtttgccgatcagttaaagatcggcgctgctagcggccgcgcccaaggcaccgaagctgctgaaaaggtccagaagaaggtttccgagcacacggagagattgcgtgaagaactttgaactaccctccttatatttgatctttcttgtttttgttccacaataatttgggatgcacggttggtttgatgtattttaaagttacgatgattatgacatttggattgtaacctgtgcttcgagttagttttgccttttgggtttacctagtgcccaaatacgccgttcgtacatatgtaaccacctttcagcataaaagaaacgatctcgcccacctttttagactgggtcttcctatagccgccgagacctctacttcacttgtgttatctcgaagatgacgcccgggggggggttgaagtcgaggccggcctccacgacttaaaactacaacacaacaaagaccatttccgactctagccttttcagggagaatcgggcgtctacgctccctacgccggtcgaggtgagaaccatcaacgaggagtcaggcaacatctgtggcacaagtttcaaccgacctccgcctgtcaagtttccatcgttgggcctgattgtcaaatatggagccgacaccaccgtgacagaggcagacccaaaatatggtatacaagcagttgaatggcaaagtaccagttcctgaggtgttggggtggaccgaagacggtgaccaagtctttatctatatgtctttgatagggcgcgaaaccttggagcaaatatggggtgctttgaacgactaggagagagaggctgtctgtaaagagctcaacggcatggttaagtcttggagatcgttagaacagcccaaccaagtcctttatgtgggtaagtctcattgcggtagctacgcagaactatgctaaagtgcttcctaggtggcctaaataatcaacctctaaatgaaatctttttttttggccaccgcgacctggctgcccattctacggtgcagacgccgtccaaaaattccagaatggctgcgatatcgagattgatggggaggtgtctatggtcttcacgcatgacgaccttgtgcccccaaatatcattttatcgcccgggccgaatccagtagtagctgccgtcattgattggggccaggcagggtggtatcctgcttactgggagtattacaaggcgcgtcacgtcaggccgaatccggaatattttgaagacttggaagaagaatggaggacgagatacctgccaactattctggacctggtcgatgatgagactgtataccacctttggctgtggtttgtcttgcctgagggtttctagttatgtgaatgaagatgtgggactatacaaccgtggtagatagacaatatatatgaattatgtatatactgtatccctgacagtagttcctagaagatctacggctcccaggagtgaatgatgtagcttcaatgaacgaggagtcagctcatactaactatgtctgcttggtcaatggacctagccaaagcatgagattcgcctgtcgtcttcatattgaactgcgggtcagttgcgatagcatcctggagattcaagagggcgatgtgatcttttgcaaaaggttcgatgtatgagtaaatattctacctttatccaagcttcaaatttaattgcttattaaataccaattcccagtttatatacaaaattcagagtcagatatgcgtctcaaaagcggttattttcggcgtcaatcctataggctatgtgtaaaatttgaggcccaaggttcttattctagattgcttatagttttttattccaagatggaaaatacaggtacaatattgtagttaccgaggacggtgaaatgaagtacaacatagaaaaggactactccgtatactataccccccttgcatccctccccacccgagcggaggcatataataaccacaagtttccatttcacaccgctattttcctgaattgccactctatctattgagcgatttacaacctcatttcggttagtatactagtcggcggattatgcgttgtccttgacggtgtaggattaataatctgatccatttggtctaggctcatattatggatgcgatatacaatcctctagtcttttttaatttctttttaatcgctttcatcttagtatattgtataaagactcccgcacataatctaaaaagtgcccctataggcacgtgactgatctgcagcctcccgggatccccacttgacactcccgaggtcgccttcctcccgtccaataaaaccacttccgaggtccaccaccggttttccctccgttgtgtacatttcatcgcctcatacgtcatgccgaagagcagcagcacatcttcagtgaagcgtcgacttcgaatgctgatccatggccgtagagctcaagtgatttcaagacattatgggttccaaaatacaagaccaagagcagcagggaaggttctccccacgtatatgcaaaccaatctgctaccccaaacccaatcttcttcggccgccggcaagcatccaaacgccgctcctatcactgctcctcggctgcgtgcccgaggagccggtgagattaatcgcttggactagtttttcctggccgtctccgctcccttagaatgtctgcacactggcggtcaagatgcactcgccaacgatattatgcatcatataaaaatgctagtggcagagcattgcccagccggcttacaattcagggacctgagatagtcttgcaaatcaagcccagattcggttgcgcttttaaattgatcctgaaaaaaaataaatcacatatcccttggcttgtcctcgtaaatgaaatatcggttattgccgtacacaccctccacaatgaatatgtattcacccaatcgttttagtgtggaatcacgatttaggagcttcggggtcaccctcagccaccagctttccaacgaccaagtacttctccatgaagcggtcttcccaggactgcaggttctccagctgatccgcatccaaatccttcaaatcatccaacggcgccgacagatccgtggtcagcatttcctcatcgaagctctggaaagccaagccgcgcgacgcgtcccggccagcgaagttctcgtaaggtccgccctgttacatttcgtcagcttcagctccaacagcgccacccggtgttctttcgcgaatttcaaacacataccggtccatagaagttcctgccaggagtgacgtcgaagacgcgcccgcggacagacaagtaaacggggcggccttcctcgccgttgaactcaataagagttttgggaatgtaggtcttaaagacagttggcggcggcgcacgggggagagtgatgggcgccctgggacggaagtgccagtacaccaagactccgaagagcgagactaagactaggttgatgggcgtcgcgatagacatcctgttgggtagcggttagttgggttggtgacgggtgagatctggggggggggaacacgaacacttcaggctgtggcgcagaatgatctgcagttttagtttctagattagcgggtgttcagaacatgagcagcaaaggacatacccatcgaggcagatcttttgtatttagagaaagcacaccggaacctcgggatgacatcttctccccgctccacgtgattggaagcttacatattctctttcattctttggcttcatggatttggatttaggagtcgtctacttctctcacgtgcgggctagagactaggctctcggacttcagattgaaaatgtaaaacgccgacgagtccctgaatttgtttcaagactctccactgactatcgcccccaatttaatctgcccactcctattagcggatgtcatgttatttcaagtttcaagttatttttatcgtctagttcctccttccttgcattttgcctaggtgttcgagtcatttttatctatataatttgttcgcgcgttcttcctttattccataggcttccgtggccgtgcattgtcgccgagaaaacagagccccttctaatattctgcggtcctttgcctcttctttctccctttcatcctctctgttgtgactgaaatccattccatcattttgcgtgaactctgcgctatcatttccgaccaaaatcagccctgtgtcacgtctagagcgtgagaaaatccgctatgtggtctaagagaccgtttcacaagcccaaacggccttcgattagcggccccatattgaatggcaatccacctaccacatcagaccctgttcatgatatggtcgccaaaagattgcccgctctgcctgagtaagtcttgtgtttgctacgtgttcaatagatagctaatggaaatcagcgacttacattcattacaatcagatgtcctgcgtgaggatatcgaaaggacgccgggcgtgtcgcctgccatttcgccggtgcttgaagcgcacaggcgagcaagcgaaagtagtttctgtgtctcgcctattggcgacggcgaccaattttctgattatgcgcgacaggagactgggaccttgtcttccccaactcctattcccaaggcagactatgttgacacaccctctcactcccgggttcaacctgtccaacctgtccagtatctccaacatgattacgactctaggcgattcatctctggtaaatcaacgcactggaataatttttcagccgaaccgaccttgagtgatgttgttagagttggtgatacccgtcaaacctctctccaaaaagcctccggacctggggctcctgctcctgctcccgctcccacttccaacctactgaattggggccaggggttcaaccccaagaagaccctcaatgcagctcgaagccggatcaccagtttctcgaagaccgaagagctttcgcaaaaggcacccagaagtagatcggcgtcacgtgggcttccagtggaagagcgtaccagcaaacgcaacggcaacggtgcgctaaagacgagtccccagctcgataactttggctttgctcctacaactgtgaccactatcaccggcggtggtccagcatccgttccccggagaccggcaacagagcacgcccaaagccgcctaccagaggagcagaaaccaatattcaagttcgataacgatttcagcgacatgatgttcacgaccgaggaatccattagccgtttcagctcaaccacatacacagccaccgagccgggaagtcgagatccaagcccgcgagtgagtatgcagcttgaaaaccgatctatggacgatgtttccacgtcctctatcatgtcccgacgccgcccaattccaatcagcgtgccgacttcgaagaagcccgtccgaaaacccactccatccgaggccgcacagcaaatcgcggatatgtccgctcaggcatcttcgcctccacccgaggtgcctctcgatgcgcatggccgcattaaggcaatggaggacaagagggatgacctgaatcagcgcagattgaatttgcaggcgttaatcctcgagttgagaaaggttgttcatcctacttcagctgtgtatgacctggctgctagaaccgaggcccagaagagcatcaaaggcattgaagacaagcttgcagatatcaagaaagaagagcacgatcttggcctgaagattactcgagcgtggcgtcgcctagacgagaaggagaatgccggcgatggcaataatctctgggtcaagcgagtcactagttagtggctgttgagttgtgaattggtccatgcgcgattgatcttgatttcatttctgcgattgtggagttgttagcgtcctgtttgattctactttttcaaggcaatgtgcttgttctttttccgatattgcgacatggtggttgtgttttgagcgttcgattccctgcattggcagcctacatggcaggatgatacccacttcggaagcccaagctgtggcggttaatgttgatgtattctagtctgattaatctcattgcttttttaaaaacaggaaactcgtatgtgaaaagcgatcaagcgcgaaataggtattggtggctaaagatatacagaagacccatagaaaataactatgggtgcagtgatgctgacgcgatcacacagccacccatcctccgctcgctcattgtacatggctcgtgtaggtcgtgaatatggactcaagaaacctggtgtcaaggctcgttgggggattgttggcaagcgatttatcgaggagtattcgatccgtttatttcttgccggacttcttgatgccttgctggccggtgttgagaggacccttcttgcccttggccgcttcctgcatgtccttgcgggccttggcatctagtggaaattagtaactgacttcgtgaagagtgtgtcaaaagccataccagccctgagcttggcctggtgagcgagctcatcctcatccagctccttcttctccttcttggctgccttcaagggcttagccttgccacctgtagatcataaggtattagtgaacaggattccaaggactagaatgcgaggtaatacgaaccttctctgccgataccacccattttgtccgaataaaataactgggagagcgggttggaaagagtcttgatagcgcggggtgtttagacggcgttggcgaagaaaaatttacatgaggggtgcttatccataccttctatggctggggcgaggaccgggctatttttgtgaatgttactagcggtataaaatgtggtattatttcaagaaaatacacaaatgttgtgctgcaatcacactgattacataaatttagcattggtgataccctaaggctagactgtatatggttagtgccatatccaaaagttatattccccgcggagatacaccacagggtagacggcaaaaacttcaatccaccgcctacttcaaccagactagcgtcgattctgccttatcgaccattgagcaactcgccatggcttttcaatcgttctcttgctgtcatcgacatcctgcacgtgcttttatctacttctcaagcctgttcttcagaaagctatgcgcctgggattttaatcacttttgcaaggctttggtgtgaaggcaggcctcttacagccggttggatttcacaaaccctttgagaagacttattgtcgctggcgcttttgctaactaagctttgttgttgaagcttcactccaaaagctgagtgaagtgaacccaagagaaaagtactgtacatacgtgtcgtttgaatccctcgaacgtaaacatgtcccttcccaggtcgaggtccccatcggtcccctctgagggtgagatcgtcgaatcaggcccagagacgaaggcaactgcgtcacaacctcctcttaatggcaccagcgttgaccgtcccaccagagctagcccatcctctgcgcccggatctcccgcctcgttgaaagacactcgatcgccaccccggcagaggtcgcggaccaggtcccactcgagatcccgctctcgctccccgtacagagagaataagaccaagcgcagtctcgacgaccccgagtcctatgatggatcctacgaccggcgaccccgcaatgagcctccgcggcgctacaggtctaggtatgacgacagacggcgtgacagacctggtccgaacaggcgcccgaactcatactacgactatgaccgcgaagagacgtacggagaagcgctacgatacagtgatgattacgaccggaatgaccgacacaaggacaagcggcagcgcacccgcagccgctctcgatccccttaccgggaatcgagaaaacccaagcagtattcaggcgacgaacttgatacaaatgttaatgccaggtcttcagcggataatggaaggcgcttgcccactgaacagttggtgagggaacgcggaaaggcttcggttggagcttcggacttgaagcttggtgctgaaaaagaaaagaaccaggtgcaggcttcttctaatctgaaagctcatgtggctgacgagtatgtttattttgttgctggcgaaaaagaacgtgttgctaatatccatcccagagaaacccctaacccagagcttgcgcaagagccggagctggctgagcccattgacgaagctgctgcacttgaagctcgtcggaaacgccgtgaagctattcgggcgaaacaccgaagccaagcgacgcctctacatctcaaagcactgaacgtcgaggttgaaacggattcatctacgcctggcactgagccaactagcgcaaaggaagcatctggtatgtttctctcggacaagcttaccctggtatcgaaactgacgcctggaaactcaatagattctccgcgagcatcccccttcgaacaacccggggaggcatttcctggcttcgttggaaaagatatggatgtggtcaaggccaatgcgcctgttggcactgacaaggatgagtcctctgctgctgattatgatccaacccttgatacaaaggaagaaagacaaaaacatggcaatgttcaggatggaaaggacgacatttcgtctgcagcatacgatgaaactaagactggcaagcaagatatcctcctccctgatgctcccccagtgccaccgccgatgaccaaggccttcgatatgtttgcagatgacgacgatgacatgttcgcagaggaagaacctgatgccaagccggcgcatgcttcggccacagctgtaccccagggcagggaactagacgtcagcatgatggataactgggatgattcggagggctattacgccgttcgactgggagagctgatcaacggaagataccatgtccatcagaatcttggcaagggaatgttctcgtccgtcgtacgtgcaactgacacgcagacagggggtctggttgccgtcaagatcattcgccagaacgccatcatgcgcaaggccggtatgaaggaaattggcatcctcgagcaactccaggaagccgacccgctaaaccaaatgcacctcatcaagttcgaccgatatttcgatcacaagggccacttgtgtatggtgtttgagaaccttagcatggacctgcgtgaggtcctgaaaaggttcggtagggacattggcttgaacatacgcgcggtacgggcctacggccagcagattttccttgggctgtgtcaccttcggcggtgtaacatcctgcatgcagatctcaagccagataatctccttgtgaacgagcaacgcaacattctgaaagtttgtgatctaggttcggcgtcgccggcctctgacaatgagattacgccttacctcgtcagtcgtttctaccgtgccccggagatcatcctgggtatcccttacgactacgccatcgatgtctggtccattggctgtaccctctttgagctgtacacgggcaagatcctcttcacggggcgaaacaacaaccagatgcttcggtccatcatggagtgccggggcaagtacccgccgaagctgcttcgccgcggaaccttgtcgcctcaccactttgatgaaatgctcaacttccacagcgtggaggaagacaagatcaccggccgcctgcacaccaagattgtggactttaagaaaccgacgcgggacttgaagacgcgcctcatggcacagggaacccgcgggatgccagattccgaggttaaagaactgagcttgttcttggacctcctcgaccggtgcttgagtctcaaccctgagaaacggatcacgcctgccgaggcattgaagcacccgttcctggcccctagggtgtgaacaaggatttgcattgattcgttgaccagggtccaaccctggtcctgggacggcgcagctcggaaggatcggcgttatcggggaggttgatctatgaggggattctttgtccatatggaacagtaactaggttcaaatcaagtccatatgtaacattttcacaaagcaacccctgtccatcctcggaccatgttgtaggactcctgccaaaccgggagtggcttaggatttatccaacctttcattagagcataaacctagcgcagtatcgaacaaagaaacccaaccagctcctaccaaaaacaacctagctctactccgtacctaggccccagcacatcggtagcgcgcgataatccattcatcactatcactatcactatcaccaacaaagaaccacccaacaaacacaaggcccccgtcgcggcgccccccttcccttcggccctagccccctatcgacccaagcccctggaactatagatctgtacaaaccaggtaaccaactaatcaaactcaactccactccacgctacctatcgtataattgcaagcacatcgtatgatgccaaacaaagaaccccaaaccttcaagcccagatccaatccaatcccaacacggcaacacaccaaactcacgaaccctcggacctcccctccccgcgagaccactaaaaacagaaaacccacgtagccaacgcccacgtaagaaccgtaagaagttctagatcgcctctaagccaaactcagtcttaggccagtctgcacccgtggcttcgtgggtatctagccgaaaccttgggcgttttccggttctgagtttctgattgtggggaggtatgaccttggattcgggatagtctatcttggttgaaccatgggaggaactattaactaggagattgaagataatagtccgtagatagataatggataatagataggtgggtgcgggattatctgattggcacggtgcgcaatgcatgtcgaatggagtacaggacactagagtgcactattgcctcctttcacgggtctgttctcttaggggcggcaaaaggcggggttcttttgcaaattgcgctcgtgtttcccggccgttggtggccattgggtggaagacgtgtcgtcgaggtaattgttggcaaatgggaggatgggagatggcaggatggtgaggattggctttgggcttgggcttagatttggatggatgccgatggctgccgatggagtgttttttgtttttttttctgcgtttgtgttattatttgcttttggtctggctagttactgttacttggggataattgtttctgtatgttgtatgttgtatattgtagttatattgtacggtcggaaaaagcaatgcgaaatggatatctgttctgtgatttacttgcatgtgtttaatggtctacgtactcgatccctagtatacaatgtacatcatacctgtagtcatcatctcaatatccaatatccatttcaactatgtttgcacggtcatacaattccgttgtagtccatgggctgcttcaagtggagtgttccagaaggcgacggcgatcaacggaagaaaggagccccttgccaccatctgaaatccaggacaaatgcaaatccaaatgccacgagcgaaaccgcccgtggcaaaagactccgcccaaataggacgggcgtttaatctccggccccctttcgtcaggttattggtctattggctgtgatcgggactagacatggatgttcgcgccatgttttcttagccccgagtaatcatgatgtcgagatgtgtttatattgtgggtcccgccacctgcagggcgagggcatctacacattggggagttgggcgttaagaggcaattgaagggtagctgtagttattactccgtaaaggagggcaatgtgcttattgggtgggagatgggatcggcggttgcagctgagtatcatgcttgcgttggagttagtagttggtttccaataagttggcagatagttacattgtatgtacactattctctcacagtcgtacagtaaccgtctatgctgtctccgtagttaatcatagcggtgtagaccgaaaccagaagccgaaaccaacgctacaacacctcacacgcccgaacacaacatctgccggtcgcagaaccaaaaaaagcaacaacgtcgcaaaaagcaacggcccggttccgagcgaaaacgagagcattgcttgctctttggacgagccagctgcattgctaatcctggggtacataactaccggtaatacattagtctatggtcggaggccaggcacgggacaccaaaagggacgggcgtcttatcacaatcacatatggcacatatcatatcacacgagtcggcagcttctacatcttgtcagacagcggacatggtacaggtacatgagactctctgcatgggcaggtttcgggtgagaaccgataacggatgtgatgaatcgcaaccccgggctttctatcaggtgattggactggatgcgggcaggcgtcgatctagggagctttgggtagagggttggttgctcaccgcaatgtagagtacctagacaacataacagacacatctcaactataacatataccatatacaatatccaacacgcatataatatacagtttgaatccatcactcggatcaatccttggcccttgcctggtatatgacgcaagtgagatccaaacaaagaagtgagattgaagactcgacgaggcaactttatgtttgcaggggctattcttaccggggctgtgcggagtactggaactatggagtacatctccgtgcttacgagagaaaggtagcccagccacccagaacatagaacggaaccagaacagaaccagaaccagaaccaacagaacgaggtcgacctcaagaatagcaccaataataatacgagcttcctccaagccgtccgagaaggtcaaggtacattagcgccaggagaagcagatgaagtgtatggcccgtgcagaactagtcagcagggaagcgccaacctccactggccctccactggccctccactggctttagggggtttctcgaaaatcgaacggttcgggcaaatggttggccatagcgcccctccatcatcgcctcactctcggacttgtttagcgtgtctagaccaagtacggagtagtactcggtggggtgtgggatagagttgggtgtctgtgcaaagacggtgtagaagatacctggtctcttcataaccaacagagaacataattagttcagacagatgcatcaatcattccgatccatggtagcaaaggaggagtagcttggaccaagatctcaatgccatagctttgcggggctggggcctgattggcagaatgtgagtggcgggtgtgttggcagtgtgtcgcagtgtgtcgcagtgtgtcaggaggtttcaaggcagaaacaccgttggggggaacaggggttgggatacgtggataaagctttgccacactaggcccagaacggaacaaccttgtgcagcgtggaaactggattggggggaaataggagacactctgcagcgtccaggtcgatcgttatgatcccatggcccaatcatcggttgtggcggctgcaggaaagaccggccgaggtctaatgattggtccgaccacactcgggcatgcacaccgcttcgtacacatggcctattattattttgggggaataatctggtttagtgccactccaggtgccactccaaggtgtgtatttttgtacgcatcatagatttaattattttgattttgattttggttttattgtgattttatttaattccttttcattcgatcctttcctctttcggtttttaatataatttccttttcgactagcgcccttttcccgtttgttttattattgttcttctcgaaccacgaggcggccatctgcctgatacatctctataataatcctccttctctctcgacttcgcgaccttgtatatttcacatccctttcttctacctcgactccctcgccttctctctttgttttgttttcatccttgtatttgttcttacttcctggtcccttgtgcaactctctccttctctcgacgtctatcaaacacaaccagaccggaccaaacggacctagatcggaccatcttaaaaacaccccattggattggaatggatgccttttgaatatccgtggatttagtctcttaatctccctggatcagactctttgcgctctctctcttatctcactctttcctcgtctcatccgggagaggaccattggatcccctctacaccaaggacatgtacccggcaatgctacccacaccaccaccctcgccggtgccccgacgctatgcgcccgaagatcgcctaggactcgtattagccaaccggctggaactcaccagagtcctgggcgtcggagcctatggcgtcgtttacaccgccgtggacattcacaccaacgaggtctatgccgtcaaggttctctgcaaggatggtctggatgcccgccaactcaagttccagcagcgcgagatcagactccaccacctggccagccaacaccgcaatgtggttcccttggttcgcatcatggattccgtggattgtacctacgtcgttatggaatattgcccagaaggagacctgttctcaaacatcaccgataagggaaactttgtcggcaatgactttttggccaagagtgtgttcctccagatcctggacgctgtacaattttgccatacgctgggaatctaccaccgggacctcaagccggagaatgtcctggtgaccgaaaatggaatgaccgtcaagcttgccgactttggcctggccacgactgattattatacgaccgactttggatgtggttccaccttctacatgtcacctggtatgcctcaaccaccctctttactatggccgtcgctaactttacatgtcagaatgccaacaagccaacgctcgacccttgtcctgctacatgtccgctgccaacgacgtctggagtctgggcgtgattctggtcaatctaacctgcggtcgcaatccatggaaacgtgcctcgattgaggattccacattccaggcctacctcaaggaccccttcttcctgaaaactattttgcctctctcctccgagatggttagtattctcagccgtgtctttgagattgacccaatgaagcggatctccatcccagagctgcgccagctcattctggagtgcccccgtttcacggagaatcccatggtcccaaccccctgggtgccggagcagatcgactacattccccagccccagatgccattgttcatggcccccatggaacccctgtatgcccagacctcaggctcgtccttggactccgcgcaatactcggccttctcccagtctgctgcttccgtcggttcggccatcaccgaggattactcggatttcgataccatgtcgcctgcagtctcgcagcagatccccgattacaagggcttcccttctgtctgcgcggaacccttctttcccgcggatcccttttcttacggcctcatgcaccctaacctccagggcctcgagatctccgtctaattgctccttgcctcgcagctgcatgacttcacgctcttctctacgtttcctctatcgaatgctctgcgggtacctcctttcgcatatctccgggcccttgctcttctctctcctccctccgccaccgagcggattcaaaaagctaccgaacaaaaagttgatcgcgttgatcatgatccactggactcggctaccagctttcttttcccttggacatatttctttactatctttcccttggaccacggctttaccctggcttaacgaccgcgaccttgcatggaccgtttgaccacagtcctgtgtcccttgcgaccgggtctcctttcttactgttttaatattcccaaatacctggaggttctttttacgttcccattttctggcgtgataatacactgggaagcatgatttgaagacacgcccctgggagggctgatgaaatacgggctcttgtttattcttttcggattggtgtatttggtcattttcacacggcgttgacgcttgttcgatttttattctctgttcatcttttggggacggctttttgttattttgacgacctaagggtgtgatctcgttctactcatgtgcatagacttttttttcgcattggcgggacatttcgggacttgttcccttttgattgattcttacgatatgatacctcggtgtggcaagagaggaatacttacttgataatctacaccactgcatctgcatttctattacagcaaattttttacaattcccgaatctcacctgcgctgcattccttgtaacgtttaacgtcttcccaacctcttttctagtacgctgttgtgcgacgttgcgccgtatgacaacggccgagactcgattcggcctgggatgatgctttgtgtttcgttgtgtgatggcttgcgccactgtgatatcgctggctgcctgagtggcacgcaggccgggacagatccattccgggttgacggtatgggtttggatggggttttacagtactaaccctgtacagctcgtggttgatctcatatacaacatgcagcagggtgacatatacatacacctcacaatctcaacacgatatatatatctatatacacatacacatttaatgaagcagatatatactattcaagatccagcccgcaacctggatatatatacatacaaaatctacatattccttccacctgtaacccgaatcgtctcaccattaacataagaaaacaaaggcgacgcaacacccagaaccgccctcgccgcctcaacagggctcgccggcctacccaggggaatatcagggtacgcaggcgcaatctgcttcttctcctgaccctgactctggtccgcagaggaaccctttttagttgcaagctgcttacccgggattccaagggcaaccttcgtgccgtcaggcgtggtgatgaacgcgccttcttccttggcggccgtcagtcgtgtagttacgaagccgaaggcgatggtgtttgaccgcacgccgaaggatgggccccattctttggcgattgtgcgggttagcccgacgacgccggctttggcgacggcgtaatttgcttggcctctatttaggattttaggatttggtatttagtaatgtagtaagtgcttgttgttgggcgaggaagagaagagtggggattggaattgggggctgggagttcggggtcgggtacttacgcattaccgtggatgccgctggtgctgctgatgttgatcactacgcgcggctcttggtctttgacccggaagtagggtgctgcggcgcgcacgagctggaagggcgccgtgttgtggacggctagcatggtttcccattgcttgtctgtcatctgtaattcgttagtgggatgctataactaacattgtagctggtaagtagtatatgtcccaccttgtgaataacaccatcccacgtgaacccggcgttgttcacaataatatggatcttgccattgccgaattcggcagctttcttgaccagttcggtgatgtagttgctgtcgaggacgtcgccgacgacggcgagagcgcggccggcctttgcggagttgatcgcgtcagcgacggcgttggctttttctatttgtttgttagatatgtacaaatttcagtgtgtaatggatctcactggcgtcgatatcagcgactacgaccttggcgccttcgtttgcgaagagtcgtgctgtttccgcgccgatgccttggcctgcgccggtgatgatggctacttggcctgccaggagaccggccgggtagttcaggtgctcgttaacttggttgagacggtcgaagggagccattttgggaactattgagtaaattgaaggtgggcattgggcttgtaagaggggaaggtcttatacaacctctcggctctgggatcgccgaggctcaccgggaccgagattgtggggtatacattgagagatggggtatgactatttattttgatattgcagttagttggttactttgcttactattctatcgtatataggcgaagtttttcgattttcttaaatagccgatctgcgtttgctgtccagcttgtgaatccaactctaccccccctagcgtatagaacaacaaaaacagttgacctcccatatgtgggtataattcagagagactcatcatgcatcactcgcccagatccacagatacactctccccatgaagtcgactgtaagaatgccgacaccgtagcttcgtagcctgcaataatggaaagcagcccttcacttctgggtgtgctcggaatatcaatatccaagtcgggaaataagccgatatgctccgcaggagaccagtgaccgatgtgctcatctaatagctttgattccgatgaactttcatggtccaacttggagatcagaacgtcggcagcattagcagtgcttttcagggccagcaatacatcccggcactgcaacaacagaccccggagcaggaagttgcgtatctgtctgttttcctcgtggcagatctcatagtatccgtagcgaatatcgacgccatgttctggccgcggtgcgcgagacgtctcccgcgaaacccagtactcaaagagctggagcgtgagattgagcactgaaatactgagcagcaggttcgtgctgtctttcgcgcatttagtacactgcaggaacatctgacaggcgcagaatgtgcatttgattgtctgcagactgtggtccagccgcaggggcatggatccagcgagtaggtggttcagccggtccatgtggaatagctgcatgtccacacactcgcatggcgagatcggatacggcgaagccacggagccggctagagacggactggccatgctgtcagccaggtccccggacagaaatgtcggcgtcacgggcgtatgtggatatcccaggccggctgggagagcaggacatggatccacaagatctgtgaatggagagctctccactgtcgtcaactgtccgggacagatggatgactctagagttgctgtgttgccgaagcttcggggactttcccagaagcctggctggtttgatatcaaacagacctacacgacggcacttattaaaaacatgccgaattggtcagaggaaaacttacgtcgttgtcgattgctgggtcgggaatatgactgccatagctattcccgactggcggttccatgtcggccataggggcaacgagccgactacctcgaaagctgcgcatcgcggacttctcttcttgcaactggcctagcttgcggagggtggctctgttcttgctaccctttggtttaccggatcgatttgcaaatccatattggcactgtaggccgtgacgcaggcaccgagtacagacactcttgccagacaggttgcatttcaccttggattgcctgcagttttcacacgcggttcggagcttaggtgtatctccgccggcatatgggctgccattggactctgcaagcattgtctgtttggtgctggtggacggggagttggtgtgaaacaggctatcccaatacgatataatgacactacctatagcccggggttcggtgatatatggatatagatggaaagaagggtaacagaggaaagaaaaaaggaaattagagatagaaatctaggatcaacgcgatgataccgcacacgtccaatgaggtagacgcttcacaccctctctacacccacttcttgtatatatataaacaagctcaagcttcagagaagtaatgtcactctggaattcaatccagtaccgacggcagccgcatacagaggtcagccgctgtgaaaccccagatgcttccatctgatcaaccacgcatgggacgccaagtggcaccgttatcccgaggttaaaaggagcatcttccctcattattctcgaatctgattcaacctgatctggcaaaagggaagttcttttgattcacagcgttcgctattttagaacattgcccatgatatgggaaaacagggtcccccaggagaaaccggctagggtccttttgttggccgtcacaccctgatgcaacatcgtaaacgccaatttcggggtcaagtttcttattggagaaccgaatgaaccttttactaacaagggctattggtgtcttgtcgctctggggcctgctctctggaacacaagtacaatagcctcgaatggacaacgctgggcaccatgtgaaatagaagtaaaaaaacatctctttctaatcggctgaccgggtctagtccctgtaagtaaattatgcgctcatcacttcattcctttcttcgtcattgtgtcattgttgcacatactaattcgagtcaccgtcagcagggggaccctttgacactcgagataatttgttgtaagccgcgccacgtacgctacaacgtgaacattccatttcatgctaccttttaaaaacgccatgagcatgttgtccaacctcgaacttgtgttgctccagaccctgactcagccgcgtggaatctgacaggtttcggcagccccgctgtgccgataatcgaatgccttcaacaaccctgtcagatgagctactgctgcgcagaccaccagcacgtggaatatttggtgcgaactccccacaatgtcgaatttcccgggcataagtcgctcaggtacgcgggccgcataaatcgcggctccaaggatatacaagaagccctgaaaaacgacccagttcagaccgacttgccgctgcatgcggtcaattccaaagagaagaaccccatggatcatggggaagacagcagacaagcccatcccaacaaacatggtagcgcggaacggacgccagcgtggggtgcggaaccggggagacgcggatacaatcacgcagcctagcccaatgatactgatcatggcccagtacttgtgctggagatcgggtgtacagtaaaatccgtagaagatactaggcacaaagcttcccacgatgagtcccacgataccgatatagtcgagtgcatttccaatgcgtgcaaccacaggtgaatggtttgagatggtgtgataggttgcggacatgccaagacagaaggcagcccccgcaaagaaacaggaaaaagcgaggatatcagaatcggccgcatcctggtaacgcggagaaagcaactggtagagctggtatgcagcgggggcagccatcagtgctggcaagaggtgggtgtagatattgaccgtctcattgtgaacgtaacccagcgattggaatgaacctaaaaatgaggacgaggcgggccgatatccagaatggatgtgatggttgtcgcgttgccagtgaggtagatcatcccaacgaagaagtcgttttaccaattcgtgagcctcctcgccgacagccgtcatcctcgtagtctgactatctaccgtcactttctgagattcaattgggcgacgttgatgaggcataatcacatgtgatatgcaagtatgcaatgagttacaggaatgttttgaagttgcccaacaaaagaatatgtaagacaagtcagcaaatgaaatccatacaaaaatcaaatcaaggaaaaagcagaaataaatatagacaagataaaaaagaacgagaaatttccaggcgttgggcagttgagggaaatcgtcctgttggggaaaagcctcggaaacaaacaagacaaacaccatgtcaactccacacttgattcatacactatgtcaacacatgtcaacacatggacatggcaaaatgagtcgcttacgcccagtatctgactctctggaaaatgtcggatttgtttcaaagggggacaagaagtgtgtttgacatgcgcactctcccgggtcaagcatgctaacattcgcagactgttggaccataagatccagacgcagtacttcgataatatagtcgatcgatacatgcggttctgtgcccatcactcgaaagacctcgatgcagccttggcctctcttccaacaagtccctccaacgatgcgacttccaatccgcccgcttcccggtcgcccttgaaatcaaaccccgcacagaagcaagtctcgccagcaacagagctatccacactccttctctccctccggaagctgcgcgaagccgttctggcaacagccacaactacaccggcagaattctcacagcgagttcacgtcttctccattcgcttgtctattctcgcgcatcacccaccgtcatacttcccctctctccgatacgttctggataaactgcactccccatctcacccactacccggcgctgaagccaacgaactggttacatacttgattcttgattatgcctgtcggcaaggagatatgattgcggcatacgaactgcgtgctcgggcgcggaaagagcattcctatcagtcgcagacagtggataaggtcttggctgccttgatccacgataattgggtggttttctggcagttacacaacagtgtggattctcatatccgcgcagtgatgaattgggctgcagaccgagttcgcaggcatgcgctcaaggccgtgggcagtgcttatctcagcgtgcatattagctggattttgggcggctgcaccggagacgaacagagttggacatgggagaaattggtcgagaaagagaagctccgctgggagcgggaaggtgataggatcatcattaaacgaccgaagcagaaaacccctcctaagccggagccaagtgcgtcgagtgcataagtcatgggtacatgagtacatgagtacatgtcggactggactttctctggacaagagcatttagtggcgttcttttcattgcatggcgttggttgggaaaacgtcacttcattaccagacggacatcattcacagagtataaattattattagatcgtgcgcagaaaggaattcaatggcccacagggcgaagtgattttcaaattaaagcgttataacttcagatctgagttcggccgatctagatttgtctgcccgatgacaggttgttttgatatcgtatcagctagccgtcccttcatgcgagttgcactgtcgctacaaagctcgtagaccgtcgacaaattgaatatcaaactaccaaacgaatggttggatgtgacctgggcctcgaggagccgacgagactaagaacaatcagtcaacaggttcaaatcaccatttaaacggctaggggtcaaatacctcatccagttgtccagtgtacagaagacacacagccagattttgagctaccagagccccgtccgtccttgtcctatcctccccgagaatacgccactcggccactgcatcggcaaagcgaccatccgacatgcttatcaaaggctttaataaaccagcctctttcgcttcattggcgtcaccaaatacctgacttgctgcgtccagatcaccaatccgcaaaagcaaaagtgccttcctcaactttgtgatgttcgactccggcccaggtacccggaggttatcaagtgatctcctggctgcatcgaaatcacgcatctctatgagtgcattcacgctcctaatcccaagatctgccaatcgctgtttccataattctcgctcagcttcagtagcttcgcttctcatgatctctcggcgcgcttcgaggccgatctcgtacaaaccaccaatgcttcggcgaggatcaccaaatcctatactctggagtctcacggccagtacgcgaagcggccatggaacaatatgacgaggatcttgttcatattcttcgtcattttctgggttataatcagcatcgactggagccgattcaagcttgagatcgatataatagaatgctgaactcaaatcttccagggccttcgattcctgtgctgcgagaactgtattgcccgacagatccaaacaggctagccgcgtgtagaaaagggagaagatgatctttatatccgtcggagatactaaagacgaagtcaaaatcgatgcagagaaatgcgccgcaatgaggaatcgaccctcggccaatagcttttctagggtgcctagagtagtcgacaaaggttcccctgggttgaggattaggaattcggatcgcagtggcagagggatttcaagatgagagagggtatggaagttgctatgccggagtagaaacgagaggtctttttctaaaggttcaggtagatcgtctggcgcaagcgggtctaactcatagaaggatgccccagaaaaggcgttgtcggcagcaagcattgatttgtgtttgacaggcgaggtgggtgtttcggggagagcgagaggactggatcgtgtaagaaaaaggatatagcggtggaaggcgatgtactaactcatccgatgcatctaaaggacctcttgtcgagctgcggggccgagaagctgcataggcaatcagtaagggacagtcggttaggtggtaatgaagtgagcgcttacacttggagatattccgaatgtgcttgcctggtactgaatccatctctacaacctttgaagtatttttgagatcaattagactgaaaagcagagcatgtatgctaatccattgaagtcgaagcaaaacacccgataagctatcggattctgccaggcggtggatgccggatctggcgacttggccgcgatctggcgttgccgaatgcaacaagctgtcagccatacgttccctatcttttcttttctcttttttttatatgatctttgctcggatcttttaccctccttactttattaattgacttgtgggttttcaacaatggcgaccgagaacaagtactcggtcattcttcccacctacaatgagcggaggaacctccctattatcatctggttgatccagaagaccttcaatgaggagtatgcgctcgctctgatatgacccaagagcactggggttaacttgtggttttttaattataggaagctggattgggaggtgattatcgtcgacgatggatcccctgacggcaccctcgagatcgcgaagcagctccagacactctatgggcccgaacacatcatcctcaagccccgtgagggaaagctcggtctgggtacagcttacgtccacggcttgaaatataccaccggcaactttgttatcatcatggacgctgacttcagccaccaccccaagttcatccctgagatgatccgaattcaaaaagagaccgacgccgacattgtgaccggaaccagatatgccaaccggggagatatcaagggtggtgtctacggctgggacttgttccgcaagttcacttcgcgcactgccaacctcatcgcggacgtcatgttgatgcccggtgtgagtgacttgactggaagcttccggctatacaaaaagccagtgctggagaaggttatcctcaaaaccgagagcaagggctacagcttccagatggagatgatggtccgtgctaaggcaatgggctacaaggtgtccgagtgtccgattaccttcgtcgaccgcctgtacggcgagagtaagctgggtggatccgagattgtcgagtacctcaaaggtgtaatgagcttgtgggtgaaggtctaaacgggccataccattggaactttggtgccccaatgcttcgattcatcttcgtctcaaatccaacatggtatcatgcctggacttgcctactgcccgtgctgtgatatacccctttctgacctctgttattctcaacccgtgcacttttgggtggtgtttgaatgacctgtttactgtcggtatcaattcaacgttctcttgccttctggatttcacatttatatgcttcaatatcatcaaccttcagcgctcagagggccttgaggtatcgtagaactcgatcaatgagatcctgctgaccttcggcatgaacattgtggctggcttcaggaacgatcccgctgtttgtatcccatttggcgcctcccgcttcgatggcttgctgccatctccgcaatagcttttccttgtccacccaatgcgggcaatattcatcttctccagaatacaaaaccaatagctttgacgtgataatgccctgcgtacccaccatgccaaaggtctcctgcaaacgcttatcactcaaatccgagctgaagagatcgtcatcagatgggtcgtcggggctatgaggactgactagactcaagaatctccgggcactaagaggcgtgtcggccggataagaaagcttcgcagtcaggttcattgggaggattgagtcgttcttatctgatgtgtatggatgctccttggccgagcgcacaagctgatcgtagacttttctgagctcgtcgggctctggagaagcatcgataatagcttgcagaccctctctatcagaggcaggcgcttgtagaatagcaccatccagcgcagggcggaccaagtgctgaatgccaaaaccaaactccttccgcggcaagggattcggcgaataaaggtagtggagtacgtcctggcttccagtcgaatgccccatgatcgcaatctttccggctgttgtcactgcaccgggttggcgcgacgccttgagatcgcgaacaaaccgcacacattgcccaatttcttctacatcgcgatcaaggcttccgactccccatccggcataggaggacgaaagtagggtagagaagaccgaccagtcggtgtcctctagagcgttagctagcttggacacatagggaacagtggaaaatccatctgtcagtccgcctatgaagataaggctgtttgtcttattgatcccccctgttggtggggtgaactcgaatgccacaagtctgggagcctgcaaatgttagcttgtcatggagaagaatggggcgattattagttacatattcatgtaggaaaccactatgcgatggcccgcgactagcatttgaggacatgatggaagtgtggttggtgataaggttacacttcgtcaagcccgaaggtgtggagggagccagttgacgttatccgattcgtaggccccggggcggctgggcgggccatatttgccctaccttattggtcttctatgatctcatgagcttaaaattcaggtttatgccaatgactttgcgacatacagtttataatgtcaccgagaggacgatctgtctaccaattgtaactaacatttactcctcaactcaaactgaagaatcgaaatcctattctaattttggtcttgaccctgagaagctattcaagattgttccaagcctgttaagccacccttctatgctcggacgactgatagtcctttcccaattccccattgaccgacctgatacttttcaccaacagtagaaaacccgtaaggatcaacggggttcgtataaggctctgataatgtcgtatagtatctgccaatcatggggtcgacacgagcctctcagacgatattccgtttatcaaatagagcagccgaagtcgcttagtttggaaggcttcctgatccgcgatgagaagatagacttcggcaatgaccttgtgcagactactcgcatgattctcaataatcttatcccggctttctatttgttttcaatcaacagggaaatcctacttcgcgctagagatattctccttcaactccttgcagaacaactcaaactatcgggagaggtgtaccgtttctcacttaatgccactgggccagctatctcgtgtaggacctcgcatataagctgctagtcatcgccgaaattgaagagattattgtcgttgaggcatgcccagtctgaggcatctttgaatatctcttcatttttctatgccttcagtgtctcgtcgtcttctaggtcggcactgtagtagaaggacaggcatgctatcggcatgatgaatccactgaactttccgacgaaggtcattgggcctccaatgaggaagaaatttctcgatttctctgttgagagttgagaagtgttagcgagttccaagttgatgatttgcagacataatggaacgtgcgatcaaaaacgttcaacagctagcccggtccttggagagatatttgctgcataatgaaaaaaagggttgggaggaaacaagaagaaaaaagcgaaggtcggagggttatatcgaagggtttagtttaggtacagtgagcggttaaggggtggatgtccaaatttatgggtgaaaagacagccgttcctggcctcaaaagcgatcattttaggtgtcaattctgcaagtggtcattttctagttctacaatgaggtatgtcgtactccgtatgtagcccacgattcgatgggtttaatcggttggtgcctagaatccaaggcaacagaactagccatcttgggactagcgtcaataccttgaccttcgtattgctgaagcttctctatttcctaaatcaaatagcggacgtctcaatacacaatattgcagctgcattgctcagtaaaacgtatattactgagctttggacaatttgacacgctttacgcatgcacatcactggtgtcattggctgtcgtcaacgacgcgacctatctaagcaagatgccttccggccgcaggtctggccgcctcaagggacccagggctctatacgttgatgatccatttaaggcagctgggatcagtgatgatgaggactccgctgagcaggaaattcctggcaaggggaaaaagaagcgcgccccgacagaagattcagcctcagataatgaatttgtcgctgggtcaggcgatgaagccgacgagggaatcgaggaagaagatgagcctgaagagggactagaagaggaattcggatcagaagccgatgcctccgaccccgaagaaatggagctcgacggcatcgaggatactcctcataaagagcgttcgatgtcgtaccaacaagatgcgagtgttaggaagcgaagagccgatggaacagttgtaccatccgccgaagagacacacactcgtggcatcatcgaaccccgagatcacttgtccaaaggcacctattacactctcacattcggttccgacgatcgagatttgatgccagccgtccacttccgaatgcgatggaacaagggtgtagatgcggtttttccatctcgctacacattagaggagacggagaagaagcctgaatatctatacgggcccacgtttggggttcacccagatgatgttctgaaagaaagcacccgcgggtgggactggtattatgatggggacattggtgagaggttccggaaaagacagcgcattgagacgattgaagagtcaatggcgttccaaaattacctacccaaaccagatgcgcgaaaacatggcattttactaggaccccatgataatcaacaactcttcgagctgggctatcatgagtcttttgactttggaaaagcctgggaaagtccaaactccaaaaaagactcatcaggagctgagatcaaaaggattcgagaaggttggatattaaacatcggccacaaggcacattgcatggcttgggctccaaaccaggatggtctgactcagtatcttgctgtggcggcgccgattacagaagatcagaaaagccagtacaaatccgaagatagtgagcctctctcatcgtttcaaccctcggagcctttccctagcgccttacagatttgggagtttaagggcaaaccgagtgaaactcttacgatggctctcgatatggactccaaaccccgccttcggcaagttttgtgtgctgactggggggacctgagacgcatggtatggtgtactttgccccggaccgaacgggtggaggacaaagaagaggaaaaagaatccattggtttacttgcaacagtttggggggatggatatgtgagagttttggatattaaaacaggtagagggtcacaagaaacagaatttcgtgagtgtccctttggagagatttcacgagtcccgctaatgtgcaagatacagtcaaaatcaaatcccctgcgtttgaggcaagaccgccatcaacagtctgcacatgtgtcacttggctatcccctagtgatattgcagtgggctgcggtaacggctttgtggctctctggaacatcgaaccttcctccatgtctgaacctctaccttttttctatcggccactccacgccacctacatactcagtatcacatcggcatacccggtccatccccaattagtcatcacgatttccatggatggcgaaacgaggatgtggtcggtcctcgatccaaccagcgaaatggcatcgacgggccgcatgcgaggagcctctcccttcatcagctattctcccatctgccagtctgttgttgccggggatgaaaacgaattcgctcgcgtaattccaattcgacggttttttaccactaccaccattgcgcggctcagcagcaccatctcggctatggcgcaatgcagttttcatcacccctgtgccctgtttggcagtgccgcaggcgaggtcgtaggaacgaatcccttccgacgagttgtttacaacaaggagcaaatttggcagcagatatggttcacacatgaatggattcctacttctaagacgaacactatgggcacaagtcgatttcatgacggatatcgggcagagaaccagaagttggcaaagtacaagctttttgagaccaaccccatcaatgggatggggacctcgacgatttacgaggaaaatacccacgtcacagccctcgggtggaaccccaaccgcccttgcgcagcctgggccagcgctgcgctggggtgtggattgctgagagtggaagatcttgccatctagtgacggcagccgtattgatcaaacaggcgatctgctagatttactactaatcatgacatgaggacatcatagtcgatctatgaaaagaaactaggtgacagtgaaacaaaatatgccatgttagttgtgtcagagtgggcccccagccacaccaattgcttacttaatgtcgctgtgggaaccccaccacaacatcgtggttggcagatacgccatgtgggttcgatcagatctcagctccacccaatcaaagctcatagaagccaattaaaaataaagtaaaaatataacccatggctggattgccgtcaacccagccaccgtagatccccagccgcctaattttggcccagtagaagtacacttcaccgtgatagtagatccttttcgtataacttttaaacccggacttgagttcttctctttcattctcaattctatcttctatccaaatctcttccaacattgcctatatctccattcaatctcaagcgtctttcccttctcaattattattgcaagcttcaatttctctctgttatcatgcatttctcttctgctgcagtcctcgccctttgctctatcagcgtgacctacgcggcgcccttcgccaatcccgagaatgaagatctcgctcgccgtgcaacctactctgtagtcaatgccgatgaagactgctcttctagcccagtcgcacgcgaagtcgacactgtcttcgaaacctccacagttactgctcctgatgccgacccagtgcccatcactgtgaccgtgactgccacaccttcaagcgtgacctctccctcaaccgctgtggctagccctacttcgtgctgggagacccctaatgttcttccaaccgctggctcttcgtctttcttccgcaggggcctgagagccgctggtcagccggctatctttgctcgcgaatactctagctctttgctttacgcgcgcgagtatcccaccgcctctgcctccgaatctctccatgctcgtggctggtactctgctgcttctggcactccttctattgcgacctctaccgcttcgcctacttccctcgtggctcgcaactttggtgattcgtactcttccgcttgggtcccaacctccagcctggtcactgccactcccctcgttgctcgtggcttgtactcttctgctgctacctcatctgcctcagcgacttcccttgtggctcgtggcttttccccttcttactctagcggaaacatccctctctcccctactcccttcgctgcccgcgacttgtacgcttctccctccggcacattctctatcccgagcatccctacttcagctgctcctctggctgctcgtggcccctatggctggtactcttccgctctcagtgcctcccccattgccacatcttctgcctctccagctatcgtggcccgtggtgcccgcagctggggctcttctagtgcatccagcaccttctctgcgtcggctactcctgtggcctactaagacagaccacatgagacaacggttttaaccttttgcaaatgaacacaagcaaggcttttcatgaagtgatgagatccttgttttatggcacgatatgattgcaacaacgaaaaagaaagattgtgaatgacttgatttatccccattacggctttggggatacatatttgactggcgtttttactggaagggattttgaaataactacaattcttcatgtgtcttttacttatgtggatatgggattgggttgcttttgcgttgggcctacatagactggatttgaatattgatgggtcccgaattacatagaatagttgcacgatgcactggaaataacaaaatgaaatgaatactttgacaattcttttgatatcatacttaattctccgatcaagagccctacataaatattgtcgacaatctcattggaaggctagggcagataaagagcttatgtaacgcggtgcgtggcggctgcacggtggttgccccgagagacgcagcggtaaacatgcatcatccctccgctcaccttcaacttcgaaaccttatgacctccaaggaagggtcttttgtgttcttacatttttttaaattatcaactgttattgtttcttattttttgttccctttgtacctgaattcctacacacttcgattgcatgcgcaagggctggccgagggtcaacatcgataacaatggggacagacgggcctacggtctgcatgtcttgtatgtggcattacactcgtgtaaatttgcactcgctgacaattgttctagttgccaacaatttctggggcaaagatgatgcaggacttcaaccaatgttggaccgcgtgcatgggtcaaagatcacaaacgacgaactgaaggttttttacagcggtacgtgacgttgacgcagccgcaataacatcgaattctaacatcttgttagctcgagccaccatcgaagatgaatacgcacggaaactccaagttctatgtcgaaaggcgctgggatcatgcgagactggatcgctccgagcctcactcgacgttgttcgtggcgagactgaagctatcgctaaggcacacgccgcaattgcaggacaaattaagacggaattggaggagccacttgctgcgtttgccagtggtattaaagagcgacgaaagattattcaacagtgcattgagcgcctacacaagaccaaaatgcaacaaacgcagctcgtcaacaaagtaagtaaagacggggagtgatgagaggtaaaatactaactctatagactcgtgatcgttacgagcaggactgtctccggatcaagggctaccttgctcagggccatatggtcatgggccaggaagagcgcaagaacaaggccaagctagagaagacccagatccagctggcatcaactagccaggaatacgaagcggccgtcaagcagctcgaggagacaactggtcgttggaataaggaatggaagtcagcatgcgacaaatttcaagatttggaagaggagcgtctggacttcacaaaaagcagtctgtggacctacgcaaacattgcttcaactgtttgtgtcagcgacgatgccgtatgtttattgtgcccgggtttattgtgcaatactaattcgacctatagtcatgcgagaaagtccgtctctctttggaagactgtgaagtggagaaggatattatgttcttcatcaaggagcgaggaactggccaagagatcccagatcctccccgattcatcaacttctgcaaggatgatgactcaagctctgacctagatgaagctgatggctactcggtagcccaattccaacgcactatgaaccctgcattccgcacatcttctcctcagccttcaaccttcgaatcacaccatgacccacagtcagagctcgcggctcaaataggacgacctactcttccagccgtgaacaatgcgccgccacctcagcagcaaccgctaccgtcacaacagcagccacccccacagcagcagccgttcatgccacagcagcctctcatgcaacagcagcctcttatgcaacagcagcctctcatgcaacagcagcctctcatgcaacagcagcctctcatgcatcagcagcctcctctgcaaccacaacaacaaccgccgctacaggcacagccccagcaacctgcacctctagacttccgccgtggtggcgcgccgcctccgaactacgaccccgagcaacatggagagatcggagctgttccccacaacgcataccccacagatggtatgaccatgttctgtcgtgccgggccaccctcagaacgaagctcagcgaccagcgcatatcgcccgtctagccaagactctcagagcgaagtttcgaactcaacctctatctctagtgtcgaggaaacacctacgaaaaagtctatagtaaagtcaacaaacagtgtgccgatgacagcttctggagatgacaaatcaccaaaaaagaagagcgctttcttcagcaacagccccttccgtcgcaagagtcgacatgacaaagaaaggcctgttgtttcttcacagcagggcatctctccaacgtcgctcgtttcacccaactccacgtctcgtagtggttgggactcgccgacaaaacaaatcagtccgacgaagcaaatgagcccacccaaacaaatcatcagcccgcccaagcaaatgagcccacctaagcaagtgagcccgcccaagcagattagtgcacccaagcaggctagcccaaccaaacaagtcagccctgtcaggccttcgggaggcctgccgggtcgtgcctctggcagcccggagcctgttgaccctcgagccaacttccagctcaatgtggggaacaatgtctttgacgtggcaaccccagaaaagagctcaccccagaaaggatcacagccgaatcaggcatctgaagatgacttggaccctatcgcgcgggctctagcagacctcaagacgggcggcaagcagtcagccactcgggtgtcggcagatagatatcacggcatctccacacccactccgtcgacatattcttcgacctatggtggcagcagtgttagcgttgctactccgcccccagcatacaatgatcccacagtcaagcgacttggcgcacctcaaccggcctttacagcaaagcaaatgcacaagacaactcagaaatatactggtcaaacccagagcatgcttcgaggacaaaacaacaataatagcatggggtctagacatagtggtcagacccaagacagtatgggatctagacatagcggtcaagaagccacccgagctagatcgccagcaccgagacggagcgtcagccctcagccccgtgtggatactcggatgagccagaacagtggcaggggcccgagccctactccgagtagttaccagtctaacagcatgcgaagtcaatacagccgatcgcccactcctcggcgtactcaagatccgtacactccaaacgagtatgctcggaggccctcgcccgctgcaagccaccgtgctgtatccccgaacccccagttcaggcagcaatctcgtccttctagctctggtggcatggagctgcagttgtctggaaaccacgatatgtacggttccagcagtcccggtggatatgctagctcagctcgaggaggcagccgcccctcatcgagttatggtgaggctcctccgcctgttggccgatctcggagccgtactatggctgttgcagagcctggacgtcaattcagccgtgacggccgcccaatcttgcactttggtaagcatttattcctcctcttcacaatgcgttgttagtatctaaccttagtccaacctcacagctcgtgctatgtactcctacaatgccgccatccctgaagagctcacctttggtaagggagatgtccttgccgttctccgtctgcaggatgacgggtggtgggaagccgaagtcaccaacgcccgtggccaccctggtcttgtgccaagcaattatctgcaaatcatttaataccccattgtactcacgacccgccacgaccctcagaacattcgtcctgaaggtgatgctctttttcttctcacatagataccacgcctttcgtctactttccttgcacattggcgatttctttctggctcagcttctattttgcttttattctcagcatggtgctacagtcccgtcttgacatcactaaacagcttgtttaatcttatcatgtttttgcggatgtttttggacactttagcgtttctgttctgggaatctttttactatgtgcttcatgtgaatttgttgaattcttttttttctgtctttttcctttctcgacagcgatccagcgaaattgtctgaaccctcgacactctatggtcttttatttttattcccgcttcctgccccaatcttcatcatttgcctttctctatgtttgtacgcttttatggaggatatgacgtgctttgctctaattgatgctctcctttctacgatgtatttcccatgacatatgtaagtagtggcctaaattgatttgaagacagtcgtgtatacttgattgatgattgcagtccctcggactggatgcgatagacttttgatttaactcatggtgcaggtacgttccagaggtgctagctttctagtaaatcttatgtctgatgttttaaaagtcattttcgactcaatgccaatgcttttgttatacatatctttcagtctcaccattctatatctttaatctttagtagaaaacatttccgacactcggtatccattatctaacagtatatctcgatcaagtaaataaaggtttacctacttaggggcttgtgagtagctatttcatttagggctgccaatgtgctctggagtgtttcctgttacccctcttcgagactgtcttcaaagcctcatgatctgaccgccttttgacgaaatccagagaaatgttcaattgacttgaatgttcttcagcttctccttcttctgcttcttcccagctataacccaccatgttatcaggtcgcatacgaccgcgtctagtgtgcgtgaccacgtccatcgtacggacacataccaagcgttccttatcaacaaagcacttctctccaaactggaaagcttacattgcgactgccggcttgatcagcacgcccggaatctggtggttgaccgctgcaggggatgatgcaccccgcctcgagtgtccattagcggagcacttggccccggagccgggtccctccaaagaggatatcacacatatgttatcgaaagaggcatactccttccatgtcagaaatattacaggtgtcaccagatacgacggcgcccagttggcgtccaatagcccctgtgaggaccggtttattcatggcgaagtttcttcatcgtggaatgaaaatgatcaatggatgtcctgggctgtttttgatggacattcaggttggcagacagcggacctattgacgaagcaactcctacctttcgtgcgacgcagattgtccgaagttaactcaccggtatcaaatgagtcagtgcagcgcgctatcatggaaggattcgtggacctcgatgattccattatcaagactgcaccggacacatctaagagcaaagaatcattccaagacaaggtcaaaaaactgattcctgcttacgctggttcatgcgctttgttgtctctatacgatcctatcacaagcacgctgcacgttgcatgtactggggattcgagagcggttttaggacaaaaaggagcagacggcaagtgggagacaattcccttgtcagttgaccaaactggcagtaacgaagaagagaccacccgcatttctaaggagcaccctggcgaggaaaacatagccaaagatggacgggttcttggaatcatggtctcaagagcctttggtgacagtctctggaagtggccgttagattttcagaaggaaatgaagcggaaattcaatggtccagcccctctaacaccacggcgtgatattcgcacacctccatacttgactgccgagccggtcgtgacaagtactaagattaatcctaacaaaccttcgttcttgattatggcaacggatgggctatgggattatctctccagtgagcagggtgtcgacttggtagtgaactggttggaaccacaacggacggagaagaatacgaccgaggagaacaagacagatgggaaatttgacttcggcagattctggacagatgtggactggcagtttgagaaggagagaatgacaatccaagatgaaaatgcagcagtacatctgatgcgtaactcccttggtggaaattaccacgagttgatagcaggccggcttgcctttgaccctcctttgtctcgacgggtacgggatgatatcactgtgcaagttgtcttttttaataccgagaagtgaatatcgatttcttggttggtctgaacatagaagtgtacctctaaaaattgtacctccgaaactcttcgggtgacggagaccaaataaagattacgaccatcactgatggatgtatcactcattttctaacaatttccatcataaattcaacaagaagagcctaccgagaatgcctgctatgtctcacctgattatacagatgccacagagtaatggaggcgttgctttgcgtactcgctcagatgattcctcggatgattcttcagatgaatctaccatgtggtgggttctatctggcgttctttggggaaccctcggcggttttataattttggcgacattccattattttagaccatttggttgtgattgtgtacgcaacatttcgcttgtttgggataaaattgctcggtaagtcgtgagcgatgataatatctctttctatcggtgtcgaatccaacagttctcatcaaagaaaagacactaacaggtcctgagatctagtgatgtttgtcgagctggatatcgaatcaaagatggcgtgaaagatgtattccaaaatgcattcaaaagggtatatcacctggctggtctaaaagcagcgcctcaggttatagccaacgaacaacaaactgcaccaggtaaggaagacctatccaaactagatactgtcaagctactgattagtactgtctttgttcagagcccatcgagatgcaagatatcacggtggaatatataagacatgaatctgatagctcggaagatccacccgactacgaatactacgggccacctgaggtgcccctgcctgtctacaaacgttaggagaactagaactaggtccggaagaatggagaggaataagaatgggctaaggataacaggatagtgtttttatattgcttgacttggcttccctgttgtgatattatggcgaatgtgacaccaccatgtggctctctatatgtttagctggtaaataaatagaatcaaaatgtagagagttgaaataagaagagaaaaatagaaaatgtagccattaagcatttaaggtaagaaacactaggtcagtggcattcgagttcttaaatgtccgcttacagtagcttcgatgcggagcgggggcaaggagctaaggggaacgaactattatttgaaaataaaacactgtcgagaataccatgataagtccgcttaagcggccgactattcttgtctctatagtaataaaaaaccagcggtgagctagggaaatctgatacggcgcactagcggttggagactggggtcttactcgcagggaagattagcatataactaatatgacaaccccactaaataggatatcgaccagaacttcttagctttaactcaagcgtctcatcctgctagtcttctttcagtgactgatgggttcctcgtagttcagttactaagatgttatagaaaagatcacgctagcagctggctctgcccacggataatgtacttgtctctatcagcactctttattcctagaggtgtatgccgaagatgaattattatctgaaagaggaccacggtcatcctgacgcaaacctggagttgagtttgtataacctaagacgtgcatttaagcattgactcgatatagaccatcctcacactattctctatcttcataccttcctcacctttactgacatatttacttgccaataatggctcctattcccagcgacaagtctgattcagcatcagaatcaccaattgatttggctgctggatatttaggggtacttatactagcaatgtgtgctctattgttgctcatgcttgtatgcgccatcgtgatccggtatctatgaccaccgagaactaagattgaacatgatgatcttataagaaaggcaaactttacagagaagctgatgctaatattactgtcattctgctagacatcatatattgaatataatcggctgctggatcaagaactgctacatccgagcaaaaacagctctcggcacaacgaggttgaaagcaaaatctttactcagcacaatcacgctgaagaaaactagaacccaaagttatggtgagacctacaccccaaaaaccaactgggtgctatgataatgtctaacctgacatgccgttatcatacagacccgaaaaatacttccgatgtgaggctgcagtacttggtccctccccctaaagcggctcataccaccacaactacaatcgatgattctccttgcagtctgtagacaatgggatttgcacacgattctcaggggaagcaagactctacgggtgaaaggatcgggacatttgaggtgatagattattctagtaaggcaattaccaattaccaatgctgattgctatattcacgtattcatgaagaatcaattcgctaccattggcattttggaaacattgggttgagtgagataagatattcgagatattaaaaattctaaaatttacaaacctggaataagataaacacaaagagaatcattcacaacgaatagcctgccgaagaaccaaagaaagaagctagcaagtattgacagacaggggtatatgaagaaaagacaggcttcgcggtaataattccagcacgtgcaattcccgaaggatcatattcattcatcatcaacaaaggagttagctagacggccaaaaaatgggacttcaaagtggtccagagtatcaactagaatgatatgataagtataagatctatctttcctgccaacgaacagctcagctgtaccggcagctcccgtgaagaaccttggaagactcaccatctcggtaagcatgcatgctaaggaagccgatcaaagcaatatcgataataaacaaaacccaggagagaaagcttgaccagcagaacagtaggtgaatgatctatttggcatgtgagcgtatgcagtattaagagggattggaatacacacaaacatggtagcaaataacatggacgattgccaagcatggaatctacagtagatagtcagcaaaccgggattccaggttattcaaccccttaataaagcctattacataccgcacataatcgctcttatgttcagctagtagtaggaatacaccccccgcgggaggcagaagcagatatgctagtgccgcttcgatatccatgcgaatgggtagacttgtttcaaaggcccctaagctcacatggccaccctcgatgtctcgtccaaatcccgtgttgccatatccgttgctagcaaagtgactgggcgagggtaggtcggtcgaggctcgcggtgagcggaggattggagatattcggtggctgtcggggtggggaggggatagagcgcgctcaagctccggggattgatcttgataaggggcgaagttcatcatgttgtcataccttgaaaggtgaatgacggaatgatcttcgggcatcaggggattaatttggagtagcatctccttatcgttatcagatcgcgacgcgtaactgcccatctgatgcctcaggcgacaatatataaagtaagggtatcatatcattcagtatcttcatagtcaaagatttattatacataaactagcgcagtccatctagactctcccccgaccgcgagcaatcccgctacctcgtgcaatcccgctggctggccgttgggttgttgtcgtagaccctcgtgttgccgtgcggcttgtgctgacactgggcgttcttcctaatccagtagttcgaactgtacccctcgtagttccacgggtgcctcgagtaccccgagtgacctgtgcgcgtcgtttttcgatttcctcggcctttctcgctgctgcttctcgctgctgctgaagtgcctgttcgcgtctttctgccgcttgctgtctttggatcgcttggttctcgatatcgatcacatcctgagtagcgccttgccaatcggggttgaggatcagtcgctgattatgctcagtttgggagagaatgcgagtccacgtgttgaggagtgtcgaggccgacgtaacggtttgtgagaccgtctatacggataattagccaaagtattgaccgtgcattatgagaagaatatattacctccatgttccctttggcggaatccaaacttgccagaagcccttctattacttcgttgatattccgcacaccttgtaattctgtccggagcgcagtctctcgagactgttgatgatcaaagagaggatcctcgccatcatgggaagctcgaggttctagtgtaggtttctcatcggaggttcttgggttgatctttttgcgggtcactctcttggatggtgaattccagaggtcctctgtgtcatcatcagacagctgaagcctctccatttcttctgctgtggtgcggaaagccatgttgaattttcagagcaggagccgaagtatgtacaagcaatctcgatagactgaacacctgaatgggcttagttttgggataactgtgagtccgaaatagttgaaggttaattgacagccgatgatcgacaagactgacagttttaagataatcaaacaagcaattggggtagatcgaaataggaagtcaacattgtttgatgcggggttttcagccaccgcaattatcgggcggtgaagatacccggtggctgggcgacaatcggctttcataacaacttcgtcctcccttcatccccaacttatcgattttagtttcatcgccttggacaattggatatctgcaagatcacgcttcataccttctttagacttttatatctccgggtgcttgcctgattttgaatatctcacaagtcggacgtggtacgcccttgattgaatcaacgctccttttcgatactttatcaaaatcgccaaatccagaaaaagccctgggatagattgtgatatactatttatacttctactcgaaagatcgcaacccttcgaacggttaatcaatcgtgattcaagtcaatatggcgtcaacaccaccgccgccttctccgtctaagcttcgtgtacctagagcaccgcgacatggggcgaagcatgacaactatgaaccttaccctacacgttactctgctagacttgctggtcaacgagcgtcaagggtccaaaccacaccgcccccaagccacccaagcacatctgccaaacatggagcagctaaaaggactctttcgccctcatcacctggcactaccaagccctcgcccaaaaagggtgcacactctcacagaactgctgcctcccgaatttccccctttgattcggaactttcacttccccgcacttctgcacaacacacctcacgttcctctgcagaacgagctttacccacaccagctaaaacaccttcgaagaagaaggtaatcagttctggctcttctacatctcgctctctgtttccttccacatccactcccaaacgcagaaaaatggaaacccccaaatattctgccgcagaatccctggacatcttcgtcgatgagcctttgagagcgtacaacattgaaactgccgagcaagaattgggtatctccattcatgaggactcgcgtgatcgcatccctgtgatcggtccactttcgactgattcgttcgttaccaaggcacgagcggtcggacgacctgctactcgctcaaccaccagccacaaaaatggagcctattttgtccagtaagtcaaacctcatgtacccgtacccaccatattcgcatattctaacttgtaatttaggcgtgggaaaaagatattcaagcgctttgacgacatggaagatgagggcgaggatgaagacgaccttggccttttcgccaaccgccctgacctgttggctgataaccctgatattctcaagagtgtgaagcctttgcgacgtggcgacatcaagcctcgtatcctcttccctgagcccgctgagcctaccgataagcacgctgaccctaccgatggtgcggaggaggatgtcaccgatgtcgaggatcacgagccaacgtctccaactccggcttatgaagaccagacatatctgactcctcccgtcttgccagatctatctaccccctcctttgaatctgagacctcatctgtctatcacactgcccccgttagacgtactggcctccgtttccatcgccctgccgtggacgatgtgacacctttctctttttctgaggacgttagtttcggctcttctaatggggatcaggctcgatcccgaggcctctctgtcagcagtggtagcagcctcctgaagtactggccgtctgtcagcaggaagacgcgggaggccgaggcccgcaccgaccgcaccaagcgtcttcgcgacgcgcgtggtagccctgctccacgcacccgacaggccgcgcgcgcggaagcatccgcggcctcgaccgctgaggcatctacgtctgattcctaggtctccaaggtgtcatctttttttcacgactttgcatcattcagcgctttgggaatttttacttttctttcatttgcgtgcaccggacttggcgcgaagtgcgtgccaatcttttgtttgttggttgcgcctgggagcaaccttttcgtcggctttcttttccttatgccgtcttttctccccacgacagccatcttgtaattgcgcaggccgctgggtttctcttgtctctttgcgttttgttgtttcagtggcgcgcgcgggcttgggagtcgtgaacactaaggatacctcatgagaacatgtattaaattggaatagcggcgtttcctcctgtcttttcatctacgctcttgtttctttctttctttctattgtttctgatggtaccggcgcattcgtttgttgtttcattcatctggaagcggtttattggtcatcacgggaggaatcatagtaaaacgggacagctcaatagaattcaggatatctcgaaacttttcctgtaactcctggtattaagtccctcgcaaaggcatatttctctgtcgagaaagactgccatttggtgtagtcaaaacaaactttcggtagtagccgggtgtacttatccacctggacattgtagacaaggggacaatacaaatacatgaatcgtcacatcgattcactacaggggttgtatctagccttctcctcgacaaatccaacaaaaaggaaatccgcccagtgcagccgggacatgctttttattcgttacagcgttataggtattcctgtccacaaggagaactcctaggtcgattagtgaccagatggatatcgccatttgaatccgtcaaatgaattccaggtcatcgtcatcgtcatcatccaagagtgcctgtttcccattgagcgtggtctcagctggcgcacccaggctctcccggccagcctccctgataccccttgaagtgatgaaccgcgtcttcttaacaccactgccatggggtttgtcatgagcacgcttcattgggcttagacggacattcttggctttgccaaaggtggtcatatccatgccgctggttgtcgtggggctcttgggcaaaggggtgtctgctgctttatctttgttgggactctcgttgctggtccttgcgcgaaggtactcggcgcccacaccaccgacacggccggtaactagcttttgggtgatgtcacgctctcgctgctgggtcgcaagacgtctgcgcattcgttcctccttgctctctatgccgcggcctatcatacccgaagcaagaaaaggatcgtcatacgaatcaatcagatttgccgccgagtctcccatgggattctggaacgaacggccagccccgcggtttctggagggcgccacatagtagagcgattgagaccccatgtcatactgagggccatcgtatctcatgtcttgcttgaaaatagctgctcgcctccttgtttccccaaataatccggtgcgcgagccagatttaccaccgggaccaagcatacccgtatcagcattgactcccgagcgttggccctgggtgcgtcgaacctggatatcaacgtggaagtcacagaactcggtctttcgaccatctatccaggattcgcaggtctttccgtcttttctcacagccttgcagaacccaatatcgcgtgccttaccaatttcgaggaccttgtcatctgatgaggacaaggacaagctgaatctgtttgtgtccagcttgtgctttggtggaggcatgatggtggggttcagaattgcgatgagagtcccttccgagattttgtaataacgggggaaagcagtgtcaaaaaggaagaggtcaatagtccatttcagatcggtcagggtaatggccatatatctgttcgtattgtttagtccatcatcataagggttattttctttagccgacgcgttccccgaagctttcttgtcccttggggcggacttggacgcaacgacgccaaataccacaaagtccccatcgatgtcttctgggagctcgaatgcgggtgccttgacggttttgagtagatcaggaatgcgcaaaactttcgtttctgcgagtgtgcggctcaagaaagaatgtggaagaacgcggcttgatagatgtagcgacgaataggactcgaattttgaagaatccggggccgccttcactaaagcatcgtctgtttggtctaagtcgtgagatgaacttggttcttcttctgccgtatgagttcgcctatgtagatgagattgtctctcgttgtgaccactgccctcggttcgtcgaacattcggagttgtgttactgcgttgtagaccggatgggcgggattgtcccatagatcgaagaatatcctcacgactaaagctttccgtcggccgctcttgtgacaacgacggtggaggggaatgctttgtatccgaagctgcagctttgaaagcctctaactctgacttgtcgacttgaaaagccgaactgcggttggcctgattggcctggaccctttctgctctctctagccgagatttctcagccgccctgccttccgccattctctcgctgaaagattttattcggttgattcctgctgttgatgaaggagaactctggggccgtgaggcgaatatgtcattagagcgaggcgcgacactgtctcgaaatcccatgtgactacttggtcgagggccgggtcttgagcttggaggtcgttccaaggatacatcattggccttccagcccttatcaatgcccatcacgtacctccgaggcgatattgggtcggtgggaggagcttctcgcctagtaggtgatgccggaacctggattccatcgctgctcgttctttgtttcccccccttggcgattcttggtgttgcaccgcggtcttcttttcgcaaagggcttattgcggagtttggtcgaacatcttcgtcgtccaaattcgaattagaccttccgcgattcttttgctggagtttcttcagctttaagcgcgctttgatctcggctagttgaagctgcagggtttcttcgtcttcttcttccccatcatcttcatccacaatttgactcgcttttgatcggatattgggtgtggttcttgatcgcttcaatggcgataccaggtttcctcgagtgcgttgcatgtcttggtactttcgtcgtccagctggcgaactcaagagagccgcgcggggtgattgaggcggccacacaggttcagccactttttcaggggagagtagttagtcaccgattagtctaatcgattggagggaccgtactggcgatcaatgagaggattcagacgtaatggagaccgaatataccatggagcgtcatttgcggcacgcgccctttacccttgcgcagagtgtagaattcgggatgtaaaatgtgtggaaggtgcagtcacaaggataacagagagctgagagccgaggacagggatacaataacaaggtcaggctgaaactcgctaatgcaaagggaaagtgacggatcgcgcgcacagggctgattggatcgggaaggcgcgttcgccgcgtcgcgcccttgccattttagccccttccgttcccacagatcttctagtcttcaccctcacttccacctattatcacacaatgaggactcgatcagcgccagtgtcaaaatcaaagaagtctgaagacgagacaaatgccaaaaccctcgttgccgcagagaaaccgagcaaaacattcatccttccatcctcaaccagcgacaatgcgcgactcgtctccctaccgaatccccagtcgggagagctaacacgctacttcttctgcccggatcgcggtatatacgaatttacggttgttgcaccaccggcgcatatggcgcggagtatcctgttcacgcctcgcacgcgtgaaacctccaatccactggacgaagagaagaaagaccccgaaccctccgcgcagggttcaatcacaaagaaggcagagttcctggtggcaactccgatcgatgcactgtttttcatggttccattgttagcaccttcctcgaaatcaggccgttctcttttccagccattcgacgatataattgattcccaagacgatatgccaaagcatctgcgccaagtcctttatgatgatgaattcagagactccctcctagcacgggcggaagctatctgtgaagtggtccaggctggtgatgagaagatgttccggttcaatgagacaaggcttgtccaggagttgatcacaaaggcagaacgtatggcggatcggggtcttcctgttagtctggaagaacggtttgttcgtcaggcactagccacgcccttgatgtcggtcaaacgagaagatgttgcgactagccaggagccatcgaacgaaagccaggattcggcctcgaaatccgaggtgagggacaattcaccctcgactgtggctacaactgcgaccccgtctattgggacacctgcaggggagtcgacacctgtgcctcaaccaccgagtgaagagtcgacagcttcggatcacactactcggctcctccgaatttccactgcactagccttcatgaaagaatcatatctgcccgccaccatggcctcgagacttgatgagatcctcgagtctgcagagagccctatcgatttcaagccgctgaaagaccgtctcaaggagattacggaccttcgtgctcaagccctcgcatcacgcgacatgtccaacttcacccggaaacgagcccttgatgatgaggaagaggatatacggggcgagaagaaacgccgcaaggatgaggcggagaaaaaatccaaggctgcagaatcccaagcagttaagaagctgaaaaaggtcaatacgagcgggatgcagaaaatgagctctttcttcgctaaggccgcacctaagaagaagacttgaaggtctctgagacaaaaccaactgaactataacatagccgtatattatacaggtaattcattgccctggcttcggaggaatccaaccagcaagttctaaggttgaaagattatgtctataaatctggaggccagagcctcctgcccagacagagcaacctactgccagtgcaaatgaggtcgagttgagatcctcgcctcgctccgcaatcccaactaatctgcgcgatttcttggaaggcaattacagtggctttctgaaagtcaccgatgcccagacgatttggggtatctttcttcgatccggcgcatctgtgtacagcttcatgtatactatttactaaataatccatgaaagataaatgtgattttatattttggattttggattttggattttggtaccagcgataaccctattcgggtgggctttgcgtcaatctgctatgtaatattcaaagagggatccggtcaatagcagcacccgtaatcctataaccagaaacattagccatcatccagtcactaatgtatgccatcgatcaaggtgtggggaaggaaacaacatacaagaacgacccattggatggcttgctaataaccatagcctcctccaatttctccttgctgatatccgggaacttcttaagataatattcatccctcaacgcagcagtaacagcctccaccttaccctgaggcagcatgtgaacggtgcaaccaccccacccagcaccggtcaagcgactaccccaagtacccgcacgacgcgcaatagcacagatctcatcgacctccggtgcactgcagtcatacgccgtagcacacgattcctgcgactcgttaagcaactgaccgaggtagtgaatgcgcttctcgtctagctgggtagccttggtgaggcaagctttaaaatcaagcacacggcgcgcctccttgaagcagtgcagcgctcgttggcggagcaggaaccgctcggcttgcacagggaatgcggagaggaaggtcgactctagctcggctacggtgatgtccagcagctgcgccatctcctcgcgcgtgtacccctcttcttgtgtgaatacgttcatggtcgtttggatcactgagtcgatttggtactctagtggatcttggacacggccttctttagccattagctcgttgtggaagttgcgcaggctgtagccgagggagctgttgtccttgggtagtgtcacgccgtggtgcttggcgaggatcacggcggcgagggtgcactctgctacgcgcaggttgtagtggcgcggggcagtatcggccttgttggaggttacgaagctctgggccatcaggaaggtgatttcgtcggaggatgtggggattgggacgtgttggacgttgaatctagggaagaattgggtgtagagcaagtagccgcgcttggagaagatagaggctgcttggtccatactgtgattacgcagtgatgttagatttctgtcggcttctgtcgtccgttgataataactcacccgccagaatagacgccaacagcgcgctccgagacaacagccagatccaacaaatcctgcttggagacgttgtggttattggccttcaacacagccagtgcactagcgcacacgaaggcagcactgctggagataccaccaccggggggcacattgccgtcgaccaagatctgcatgctggcagggacgagcgagccatcgggcttctccttgcgcaggaacttgagggcgcccgacaggccggcacggaaataattcacccactcgtgcttcttggggtcgatctcgacatccttatcgtggggcacgctaaactcgcgcgtggggaatttctccggcgagacgttggcgattgtgatggtggtgccctccgcgctggcagtgaccaccttgacagccatgatcacgtcaacgctgacagcagtcggtaggacatcgtacagtgagtagtcgatgtgctcgccgatgatgttcacgcgaccaggactccgcgccacgaaatctgggcggtggttatatgtcttattgaactgggtgatgagattggtccatcttttctggtgctccggtgcaactgaagtcagcgaggcgtcgtctgttgcgtagacttccgcgatggattctgtttgcggcacgagctcctgttggggtggcatggcggggtaagggaaggtcgaaggcggggaagtgaggagagataagaatgggaagaaaaacaaaggaaccgaagatgtaaaaaaggagaagtagtaggagtagagctgaagtagtaatttgtgtgtaattcctcttcaaccagatgtctccatattccccgattccggataaagtggcacgtggggttgcagtagggccatttttgcctttttgagggattccggtggttgcgtgtagctgctttgcggggattgcccccggagtctccattcatcaataactccacgctttctgattggttggttagtttcctctcgcggcggctttctaccggattaggctatgacggcattttctattctatagacatatgttgaatgttccatctctgcttcttgttctggctctttaattgtacctaattcatccctaccgtaatccccttatatccacaacatggccttgctctacgatgtacgtaggcatgttcctggactgcggagtctcgagccgaccgcatgaggtggcggtatcccgaaagtggacctgaagatcggcattgtgccatctaactacggcccgatagaacccgagccttcaaaggataaaaagactatggattcaaaaaaaaaagaaaaggaatggttggaaccctcgactttggcgttattagcaccgcactctaaccaactgagttatggaaccagaccggaacttctgccagtaattgcctactccaataatcatcatacatattaaggactcatggagactcgttttctatttaaaactacgcggattttggggataaaggaaatatcgccgccagaaagagcatcggacgatggcattcttatagctctttagatagtatgtttgaaaatccctcggaatttccgagcacagtctgcggtatatatgttgtgtatagaacctggtatactccgtacatagatggttgggcaaccagtgtatatgttgtacctaaatgtgccaataatagtttgcatgcggggtttcgagctgatcccaagccgatggtattctgtcgtctggttcaactcgatctaattgtatatacccattagttattccaagaatatagagaatttgaatatacctctacgaaataatccaagtcaaggcgcagaataccagtagagaaaatctactccgaaacaacatgataattgttgacttgtttggataggtgatcaggaaaaagaccagcgtagccgagcaaaagacctcggaggctttggtattagcagatcatgaagtaagggatcaataacatcgcatatactatatacaaagggcgcaacaggaataagatccttacaaggtacttcgtaggctccagacgctcgggccgatctagaccctctagaccgaaaagttcgggggatctaaagtcaaagttccggtgagttttgtgtagtaggggcttgactatcgtgactttgaagtccctgtctctggtagacatccactatatgtctaattcattaatgatttgttgggaggtgtacaatagatatgtgtacaccgtacgacagactattgttgccgaggacgtacgggaaaatcaaatcaggtgaccgagccacggccgaggtcggagggcgcgaaggcgcatcaagccaatcagaggccccaaatttcttgactcagagcggtcggacattttgggttaggcgttttctcggaaaccccagagacgagtcactggtaatcttcagcggtcaattggcactcatttttctttactttaaatcactctaccctcagtcttcctggcttggccgtcattcacgatgatgcctttaagaccctcaaaaagtgctctgcgagcattccacctccagaaacagcttgctggacgtcgacctttttctacctcatttgtggcttcggccgcttcgccccaccgctcctctgtccaaaagcgtgctcagagcacagctacggcttcaaatccgtgagtttttttgtgcctcctatgatcaaaatgtaattgcagtttgattctgaactttttaatcgtcagggagtccagacccgtgcccagtccgtcattcaaccaggaaccccatcgcaatgagatttctcccttgcaacaccgccagctccccgagctcgatgactcgtatgttaccctgaggaaattttggacacatgaaaactaattagttggtataaagaatggttggaatgagtggtggcgagatcttccacgagatgatgcttcgccagggtgtgaagcacatctgtgagtacttcatgcttgatattgcacaattggccggttctaatatttgatgtgcagtcggttaccccggtggtgctattctccccgttttcgatgctatctacaactccaagcacttcgatttccttcttcccaagcacgaacagggtgctggtcacatggccgagggttatgcccgtgcctctggcaagcccggtgtcgttctcgttacttctggccctggtgctaccaacgttattactcccatgcaagatgctatgtcagatggtactccgatggttgttttctgtggtcaggtccctaccagcgctattggaaccgattccttccaagaagccgatgtgatcggtatctcccgtgcctgcaccaagtggaacgtgatggtcaagtccgttggtgagctacctcgccgcatccaggaagctttcgagatcgccacgagtggtcgtccaggtcccgtcctggttgacctacccaaggatgtcactgctggcattctccgcaaccctattcccatgcacagcactatcccttcgctccctagcgcagctaccgtggcggcccgtgaaatgagccggaagcagcttgagagcaccatcaaccgtgttgctcacctcgttaacattgccaaaaagcctgtcctctacgttggacagggtctccttgctcgccccgatggccccatgatcctcaaggagtttgccgataaggcatgcattccggtcaccaccaccctgcagggccttggtggatttgacgagttggatcccaaggctctccacatgttgggtatgcacggatccgcttacgccaacatggctatgcaggaggctgatctgatcattgctgttggtgcccgtttcgatgaccgtgtgactctcagcatccccaagtttgcgcctcaagccaagcttgctgctactgaaggccgcggtggtatcgtgcatttcgagatcatgccgaagaacatcaacaaggttgtccaggccaatgaggccgtggagggtgactgtgccgacaacctccgtcttcttttgccccatgtcaaggctgtttccgagcgacctgaatggttcgagcaaatcaacgactggaagaagcgcttccccctgacactctatgaccgtcagaccgaggatggtcctatcaagccccaggctgttatcgagaagcttagcgaactcaccgccgaccggaaggaaaagaccattatcaccactggtgtcggacagcaccagatgtggactgcccagcacttccgctggcgtcaccctcgtaccatgatcacctccggtggtctcggcactatgggcttcggtctccccgccgctcttggagccaaggtggcccgtccggactgcctcgtcatcgatatcgatggtgatgcttctttcaacatgactcttactgagctttccaccgctgctcagttcaacattggtgtcaaggtccttctgatcaacaacgaggagcagggtatggtcactcaatggtaagctgttccctccggtcttcctagtatatctggcttacttttttgttacaggcaaaacctcttctacgaggatcgttactcccacactcaccagcagaaccccgacttcgtcccacttgcaaaggctatgcgcgtcgctgccgacaagtgcttcaaaccctccgaacttgaggagaagttgaagtggctgattgatcacgatggccctgccctcctggaggtcatcactgaccgtaaagtgcccgttcttcctatggtgccttctggccgcggtcttcacgagttcttggtctacgatgaaggtacgcaaacccctggctagtgatttaggaaacagcattaactcatttattacagccaaggatttggagcgcaaggagctgatgcgccagcgtaatgtcgacttccatgtccggaaagagtaggtgactagccaatgtcacctcgacaattcatatttctatactttgatatccatggcgtttcttggctggttcaccaaaagcgattagggcaatatctgtctaaagatgaacaaaaaatttgtcaaccgggttgctcttggaggtctctttggcagagaagtttggtgcacgcgggttctatatacctgttaggcttaacctatcgctatatccttgaaactaccatggtgaattgcatgaacacgtgctccaccatggcctttgatcgatgttggccttctctcttgccatgttgctcctcttgtatataatcatttgacgtctcgggttcctcgatgggacttgggaaattgatatgtttgggttccattaaataggggcagttagtcattgaaagcatttacctcttgtttcattacgcgtcaatgaacacttccttgtatgtttatcatcctagatggcttttatatttgtcacttaaaaatgtacgtagctccagctctggtggtgttctttcataatctaaatgtggaaccaccttcctaaacgggtaataggttggaaagcagagggcaagccatataggaagcaaagtaaactgcatacattctagctattgctttgccttttggcatagtagagcatgtcaataaaacctgcagtcaaaaacgaagagccaaggctggatatgcctaacggatggtaacgaaagaagcctacccacatggcagagcatacttatccaaacaggcgattataccttcgcacctgacacatttgcaaacaatatctctttctttccgtcccattaacacgctcgctttgatcacgttctttcatataccctagggcttgcataccgcacagcaaacgaccattaagagtagcatgttatattcccctcaaccaccttaaccttcacaaatcacaccttcttttgataccaccactctagagacatccattttaaccatcttgttcctatcaagaacctgactagggaatgatactagatcatggactctaagaggtatggtttagatctctcttacttttgcaagatattacaatcgatttgagagatatctgaatatggttcgagaacctcattgctaacccatttaatctataaaaggctgtgccgtgatttcgccaaaggcaattgccgatggaaaaactgcaaatttgttcatgcaagcaatggccaaagtcaaagccacagtccaacaatcccagcaagcccagcaagccaggtccaacgtcctgagccgctgccccaaagatcttgtatcttgccaaatgcagataaggagtttcgagcatggcaaaacagcattcctctacgctcgacggtcactcgtccatcctctgggaagaaaacaactctcttccagaaagcgagggaactgattggatctgacgccagtattcgacaagaagtcatacgaacattggccagtgaggatggcctgcgcctcatcctggaccttgtccaggaaaactttgaagaaatgaatgccgcaaccagagacctgcttttcaagactcaggtgctaccatttctagagacaatcaccaaccccgaggttgcatcctctctagtattggaacaggcagtgggcacaatctacaatgtcttgtttggacttgacggatccagagcagcgcgatggctcaatttcatctgtggcgttctcgagatcgacaccaccaacgaaggcagtgccatgttactggaggcatctctccacacgttctctcgtatcgcggacctgaattctactgctcctgtccaggattgcctgcatgccgttgcccagagatttgaaactgtgttgacctcgatgaatgataagaatggaatgagcggcagactttaccagtctcggatgcaccttgatcgtcttcttcagcgcatggagactggaaactcgctctcaactggtaccacggagaacaaagtcaagaatgaaagcaacgtcgcttttgtcgccaaccgcgagacgcccggcggcagacacaacaatgactttgacgatatctgtcagatcaagatcatgcccacctttgaagaaatctgcagccttcgaggggagtatctgcccgtcaataacccacttcaatggcacattgatggtgtcgacggattgctagatcgaaactttcggttgttgcgagaagacaccgtcggtcaacttcgagatgcaatccaccacgaactaagtccccgtgcgcagagatcgcaattgcgcaggttcgtatatcccaattccattgtggtcaagctcgagttcaattggctttgggggttctacttcgaagtcgacttccctcaacctgctggagtaagaaacttcacacctaaggcccgagagacgtggtggcagaactcgaaacgtctacagcccggggcgcttgtgtgtctaatcgttcaaaaagacgtggttgtgttttgcactgtgacacatcgtgacatgtcaccgaggtacagaaaggataccccctcacaggatcacgtccccccagagaacaaggcaaatccaagaactttatggaagagcgccacgagaggctcagttatgttgatgccagttgattctcggtgcaacaacactcaagtcgttctggaccttttcgactccaaaaaagccaatatgtctctggtggagtttccaggagtcattcttccagcttttgagccggctctcagggcacttcagtcgatgaagagaaccaaaaatctacctttctcggagctgtttgtcccgtggaccttcgacgatttcaacttatttgacatggcccctcccttgtatgctttgcagcctggttttgctttcaatctccgctgcctcatgaagaatgatacgaatttctacgtccgcgttgatcaaccatctaacgtgaaatacgtacaggataattccaccctggatggtgcacaggctcatgcattgatcagctgtttgaaaagaaagctcggtttgattcaagggccacctggtaccggcaagagctacactggtgtggctcttatcaaagtcttactggcaaacaaagacgctgctgctggaggaaacctggggcccatattatgtgtcacatacaccaatcatgctcttgaccagcttcttgaatctttactggacaacaaggttacatcgcaaattgttcgtattggatcacagtccaagtcggagaggttggaaagattcaaccttcacattgttgcgagagatacaccaagaacaaaaatggagaaaaaagaacgatggagtacagctgagatactgtcatattgcgaagaagattttcgcgcgcttgacctgaaaaatgaggtctccattgcgcgtctcaagtcctatatccaacgaacaaaccccagccaacataatcagctgttttcactggtccaagaagatggttctttgagagtacaaaaagacaacccccagaccgcgatcaactcctgggtggattcagcgcctgcaggcagtgctcgtgcacggcctgtggaggaactcaaaaacattaatgtcttcgagatgtctcgagaagaacgacagcttctttacaaccgctggtgtcatgattaccgggcagaagttgaagaaagagttaggcgaatcgtttcctctcacgagattgccaaaaagggatatgatagcgtccaggatgaaatgcaccttcgctgcttggctgaggcagatgtcattggcatcactactgcaggacttgctcgcagattggatatgttccgaagacttcaatgcaagttcatgctgtgcgaagaggctggtgaggttcttgaatctcatattcttactgcgtttctaccttctgttgagcatgcagtcctcatcggcgatcagcaacagcttcgtcctcaagtccagaattacgatctttccagcgagaatcatcgaggtggagcacaatattcactcgatatttccttgtttgagagactggtgagctcaaacaaaagccccatggactgtggagctcctttcagcacattggaaacacagcgtcgaatgcatccgtctatcgctcgtctggtccgtaaaaccttgtatccaagtttgaaggatgctccatccgtttcagagtatccggagattatggggatgcggaaaagactgttctggttggatcaccggcatcaagagggaggatctgacggcgattccatgtcaacctctcactggaatagtcatgagattgatatgaccgttgcactggtcaaccatctggttcaacaaggcgaatacaaacacggagacattgcagtgttgactccgtatctgggccagctccaccgactacgaaaacggttcgatgaactctttgccattatggtagggaaccgtgaccgagttgagctcaaacaggcggggtttgcaggttatgaaaccaaggataagcctacgatcaaagcagccttgtcagaaactcttcgcatggccaccgtggataatttccaaggcgaagaagctaaggttgttgtgatatctctagtccgcagcaacgcaaagaaccaatgcggctttctgcgcacttccaatcggatcaatgtcctgctgtcgcgagcacaacacggcatgtacatcattggcaattcgcagacctcaatccatgttcctatgtgggctcaagttgtgaagattctgagacaagaacacaatatcggaaaggccttggagctccaatgtcctcgccatccagatacaccgattgtggtctcgacaccagaggattttccaaagttctcccccgaaggaggttgcaacctgcgctgtgtcaaccgcctgcgctgtggacatgcctgtatccagaaatgccattcggatgtgcttcacaacgctgtcttttgcctagagccttgccctcgatcgttgggtggctgcaatcacccgtgccccaagcgatgcggggatcgttgtccggaaaagtgcatggtcaacgtataccaaaaggacaggacacttctttgcggccatccaatgccagaccttccttgttggcaggatcaagatatctccaaggttcgctgtctggtgcctgtggacaagacgatcctagggtgcagtcataccacctcactgccgtgccatatcgatgtggaagcacaagactatcgctgcctcgctcaatgccgcagcctccttccttgtggacacttatgcaagaagatttgttaccgctgcatcaccaaaggacctgagagcgtcccagctaatcatggaaattgcgaacaacggtgtgatcgaaatcaatctacatgcgctcatacctgcagcattccttgccacgctgagaagccctgtcctccatgcaaagctccttgcgaggtgcactgcggccattccaagtgcccacgaaaatgctatgagccatgtactccctgcgcggaagaaaaatgtctttcagcgtgtcctcacagcgtctgttcaatgccgtgtgcagccccttgtgaccatgttccatgttccaagcgatgcgagaagaagctcgaatgtgggcaccagtgcccgtcagtgtgtggagaaaaatgtccctcgtcctccttttgccaaacctgcggaaacgaggacatccataatcatcaagtcgatttcatcctgggtgaaacatacagagaaatcaaccttgacgaaaacccatgtgtattccccaagtgtggacatttcctgacaatcgaaaacatggatgcgcaaatggatatggctagctactacgatgtcgacgccagcggcaagcctgtctctatctgcgtatcattggcaccgttctcgattcaagacatcaagacatgcgccacctgtcgtggcccattgcgagatatttcccgatatggtcggctggttcgccgagctatccttgatgagtcaacgaagaaattgatcatcttcctcaatcaggaatatgtccctcttgcacaagaacttccccagcttgtccgtgaattgcatgaatgtgatggccaaagaatgtatccatggccagcggtgattgagatatctggcgcacgaagccatcaaatccagagcatgggcgagatcatcgagagcacaaatccaggtcgatgggatgcaatccttgatctgcgaaagcgtgtcgatctctatcggcaccatgtgaaacccgaagagcaaccctttgaaagagttcggagaatgatcgaaaatgcccgacagcgccaaggcctcacaaccaaccctaagcatgtcgataatgtgctgcagacaaaaggcttcctacaaggcaccgccctcttgatccgcctagacattgctttgattgttgaccttttagatctcggttcccagggacgacctcacttggtcgcacctcgattcgagcttgacctacagaagatgaaggacgattgccagaccctcatccgccacgcggccagtcaccatcgacttctacagcaggcagagggtcatattttcttagcacagctctatgccctggaacgagcacattgcttgactccagagaagaggaacaatatcttgatgcatggccaggcttccattcagaaagccaaaggtctttgcgatgcacacccaggccagacacgaggactggcagatgaagttcatagcgtggagaaaatgttgcgcggaggcacattctacacaattatcaccaacgaggaacgcatgtcagtcctttcggcgatggctcaagagttcaggggaactggacattggtactattgtcgcaacggacatccgtttaccattggagactgtgggttggctcgggagataagtcgctgtcccgagtgtgatgccccggtgggaggtgagagttcggaattggcagatggagtgagactggcggtggactgggatctggacagggagagattgaatctgtagggggagatgggttgattctgttgctctttgcgctgctcattctttgtgtgcatcctttgtgattaggcaactcaatttgcgtgccgtacagcaggtagtcaggacacattgaaattttctactttgactgtttggagactataaatatataagtaaaagctttgaagcttaaaaccgtgaaggtttaaaaatgaaagctctggcgatgtaagaggtggaatgttatgagcagccgctatcggctgccgtaagaagttcacgggtgacgtctcggggagtctcaaggtgacacgcctaagcttatcctgcactcacctccttccgctttccctcccccattattcccaccttggtactttttttatgaattgattcgcatgcactctcgctagctcattgtctttggcattgcatgtgttcaccctgctctccccacagtttccacccctcacccgttccatgatggctagcccaccacccgtcaccgaggaccagaaccgcccccccccggggggatttgggggggggggggnnnnnnnnnnnnnnnnnnnnnnnnnnnnnnnnnnnnnnnnnnnnnnnnnnnnnnnnnnnnnnnnnnnnnnnnnnnnnnnnnnnnnnnnnnnnnnnnnnnnnnnnnnnnnnnnnnnnnnnnnnnnnnnnnnnnnnnnnnnnnnnnnnnnnnnnnnnnnnnnnnnnnnnnnnnnnnnnnnnnnnnnnnnnnnnnnnnnnnnnnnnnnnnnnnnnnnnnnnnnnnnnnnnnnnnnnnnnnnnnnnnnnnnnnnnnnnnnnnnnnnnnnnnnnnnnnnnnnnnnnnnnnnnnnnnnnnnnnnnnnnnnnnnnnnnnnnnnnnngagcccgcctcctcgaggaggcattgggggtggtgaggcagcagtcgagtctgatgcgcaaatgcctagagactcctggaaagctcatggatgcgctcaaatgcgggtgagctcccccatgaaactccccaggcagcgacctcggaacgtgcgcaatgggttcgtatgctaaccgcttgaaatcaacttctacagatcgactcttgtttccgaattacgaacccccagtctcggtccgaaacagtattacgaattgtatatggccgtttttgatgctctgcgacacctttccgtctacctaaaggagaaccaccccgtcaaccatcttgccgacctgtacgagctcgttcagtatgccggcaatatcgtcccccgcttgtacttgatgatcaccgtaggtactgtttacatgtccgtcgaagatgcgccggtcaaggagatcatgaaggatatgatggaaatgagccgaggcgtccagcacccgatccgtggcctgttcttacgatactacctctctggccaagcacgggatcatttgcccctgggaagtggtgatggcccagagggtaacatgcaggattcgatcaactttgttttgacgaattttgtggaaatgaacaagctctgggttcggcttcagcaccagggcccctcacgagagcgggataggcgcatacaagaacgacgtgaactggagctgcttgttggtagcaacatcgttcgactcagtcagttggttgatcttgaggggtacaagtccggtattttgcaagcgcttttagaacaagtcgtacaatgccgagatgttctcgcgcaagaatatctcctggaaggtacggctcctttttttttttggaagatactcttgcttggtccatttgctaatttgatcaacagttatcacgaaggtcttcccagatgagtttcacctgcacaccctagaccttctattgtcttccatcgccagacttaacccaaacgtggatctgaagaaaatcgtcattggtcttatggaccgcttgtcttcttatgccgcaagggaagcggactcggcagtggagccagaagtacgaaaaaaaagcgaggaagaagctgtcgccaagctattgcaaaagctcgagcttgccaaagaaaccaaagccgaggagtcgaaggaaaccagcatcagcacgagcaccgatgaaacttccaaggaaaatggtaccgagaatggcgaagcagaagcacccagcgaaagccctgagcctgctgaacctccaacggaagaaaaccaggttgagtgtggggatgatgctaagcctggtattccagcagaaatcaagctgtacgatatcttctacgaccaagtggttaatttgatccgaacgcgtgcattgccgattcaagataccatggcgctgttggtatcacttgtcaatttggcattgaatacctatccagatcggttagagtacgttgaccaggtcctggactttgcgacgcaaaaaactgccgaatacaccgatcatgccgatttgcattccgcaccaacccaacaacacatcctccaccttctcaatgctcctcttaaatcatacatttcgatcttcacagccttggccttgccacattacctgccactactggcctcacagtcgtaccccacaaggagggctgttgcgggcgaggtgattcgcagtcttttgaggaacaagatcttgatatccacaccggaaaacctcgaccgtgtgctccaggcggtaagagtattgatcaaggaaggcatgcagcagtctgctggataccccgggtcacagtctcagcggcggggaggagaaaccgatgaaacggtagaagagcaagggtggcttgcgagactcgtacacttgattcaagcatcggataatgacacccagctaaaggtaagatcacttgccagatgtgttacacctataactaacagtctgtggcagcttctccaagcaacgcgcaaggcattggccgatggtaatgaacgaatccgctataccactcccgcgatcataacggcctcggtccgattggcccgcaaattgaagtcgcgcgagcattacgacgacaattggcaatcacagtcgtcggctctataccgattcatgcaccagagcatcaacaatttgtaccagcgcgtcaatccaggttgcgctgatctctcactgcgactgtttgtcatgtgtggcgagattgccgatcaaaccggatttgaggaagttagctacgagttctttgcgcaggcattcaccatctatgaagatgctattagtgactcacgcgcccagttccaggccgtctgcattatttcgggcgccctacatgggagtcgtggattctccaaggagaactatgacacactcattaccaaagctgcgctacacggaagcaaactcctcaagaagcctgatcaatgtcgtgcggtgtatctcgcaagccacctttggtgggtagttgagaaccctcaacgcgaagaagatgagcctaagggtgtaagttttatttccaactcgaattacaatatcttagtatctttcagctgacatcaattttacagctctaccgcgacggcaaacgagtcctcgagtgcctccagcgcgccctccgtgttgccgatgcgtgcatggacaccgctgtctccgtcgagctctttgtggagatcctcaaccgctatgtctactatttcgaccagcagaacgagaccgtcactaccaagtacttgaacggtctcattgaactaattcactccaacctgcagaccaacgaagacgagcaaaatactaaccttgacggcccgaagcgccacttctatcgcacgctggagtatatccgctctcgcgaatacgaaggcattgtgacagatccaccgaagtaattgccaaatggatttccagaccattttggtcaagatgcaccccccggtcatcttctagaagcactgtatgtcattgatacgtgggattcctgctttgatcctcctggaaagacttttttgtttgctcgacttcatttccttggtcatttttttgtctttctcttgttcctggaagcctgcctctttttctcttgctgctcctcggatttctttcattcctagtatatacaagtgtatcattgtctccggataacaccatacccttttcagcatgatttgtattggccatggacaacatcttttttgcctttttgtagtacaaacacgcaccagtgtagctccgtgaagttgatcaatcataatgaatatgactgaccatacctatatacctatatattcatgcgaggagccgtaccaaatttcttccggaaaatatatatccaaaaacctacccaagatgtttttttacgttgctatgttctacgcaaaaagccaacaaacgaaagccgaagaaaccttcgatcatgcaattggtcaaggacgatgacggagtgggggattaaccctatctccacggatatcgctgcataatgtagaaaggccagagactcataccgtacatgaaacaaatccggatgccgtacttcgaaaagtaaggcattcaagcattggaaaaacaccaagcaaataaacaacccatatcaatagcagtgactccttcggttagaaagatgtagacagatgtgtgattatgacgtgaatccatgacgcttcagtaaaaagggacgagaaaaaaaagaaatgaaaaagaaatagatgagggcatttcaaagtcgttccaacaagagtgcgaaaaaggaggccaagaagaatactcaaggcggattagcatcaaatcatgatcaggatagagaagtcccgaataagccagtcggaggcgaagcatactgccgcagcacagagggcccaccaaatccgccgaagggggctgggtggctgttactggggatcgggctgccgatatccccaggcacaatgctgccccgatgaccggagaccgcgctgttgggatcgggctcgaatcggacagactggccattcgggccttccttgatagaaaacgatccgccgccattctgggcactaccttccgtatcgcagatgtccagcatttcatccaaagagatcgatggctcgcctgagttgcgcaattgctccacctgaccgagaacaaggttcacatcgtggaagcttccagtaccgttctgcgggctggtcatcgtgtttaactgcttgcatgcttggatgaccaacaggcgaattgtaacgggccgagaagtgtgggaccgatgatgaacacccgctgcgaaggcattattaggaggccagccagttccagcaggggcgggtccccatgcggaagggaatggggagcccgcaaagggcgccgcactccatgtagtgttacccattggagaaccaaccgcgaagtgattttgtggggtacccagaggatccgagaacaaggacgatccttggaagctcgctcgcgttggccccggaaatgccccaggtgcgggggcaccaggcaatgattgagacaggtttgacggatatgtagcatcagtgtcatccagaagcgcactgctacctagatgagcactcaagccatccacttcccgttgcactgaagcattgccattgttctgccgatcctgtgcggagctggatgggcgtttgatagggcttggccgtgtgatggggaatggctgggtcccagactctaacggggagcggtcaaatgaaagggagggctgcctggaatgggcttttgacagaccggcttgctgcaaggggaaggccccaggcactccatggttgccagcgaagctaaggccatgtccagaatcgggtgggaacgctcggctcggcggcatggggcgtacaccgttcattccaggcggcgcaggaattccaccagatccattgaatgatcgcaaagggttcatcatgcccgcattcgacgaatacattgattctgaagggtgattcgatcgcgcagccattcctggtatgccggggggattgaacggcagacctccgaggccagcgaatgctgaaggatttgcgcgccctagaggtgacagaggggcagaaggctgcggatggtgcaaaggaggctgttgatagccttgtctggcaccgaaagacgctcctgactgcggaggacccatggaacgtggggaaatggaagaagggtgatgagaggaatcggcgctgttaggttgagagtgaggagaggatgtagaagagccatgatgagattgttgacgaggtcttgccggagtcgagaccttgggaacaataggtgtcgccataggataatgcggagactgcaggaaaccaggaggagcctgagactggatattgtatgggatgacgcctggcagagtgtgtggtggcgaggttctgatttgttcgcgctttccactccgatctcgaatttcctgctctcgtgctgcgtctcggtccttcctcgcctgctcttcacgcattttgcgctcacgctcctcttctctggttttcttttccagggcctcacgctcttccttctctttgcgtttggcttcctctcgtctcttcttctcctctttttgttctcgttgcttacgctcagcttcagcttgacgttcccgttcttctttgagtcgtcgctgcttctcggcttctttgcgagcacgctcttcctcttgtgcctttctttcggcatcacgtttcttccgttgctcttcgcgcttcaatcgctgttcttcgagtttcttatcttgcgcagccttcagagccgcctcttcggccgctttctccgcatctcggcgggccttctcctcttcttttgcttgtctttgcaaacgcttcttatctttcttcttttgcgcttcccgggcctttttagcattgcgctgttcgttcagcgtctcctcttggagtagctcatcgattagctgtttctggcgctgttcggcaaccttctctcgatatgccgtcatgactcgttgctcaaacattcgggcggcgaaaatctggaacatccgtcgcccttcctgcatgcgttgttcctcggtcatggcatcctgttaccgttattagcaaattggctcgagcaatatgagatcgtagacccgtaccatttcgtcttcgtcgaactcttcctcctcttgactatcatagtcctcatcgtcctcttcatcatcgtaatcctcatcatccaaaggaccgtgattatgcccatggaaggactgatgagcagcagctattccgtactgtgtatcttcctctctttgcattctccgttcagccaattgctccatcatatcgatgaagtgcttgccatcgtttttcagaagatcgtccgcaactgtaagaattccatctgataagaaaataattagtatccaaagttagaggtcgatctctcataatatcaatcaagtgatcttgttgcataccctttacagttagactgttgccaaatgcaaaaaaatcggcgcgggccgctcgagcttcatcatcctcaaggtcctcgtcgctgtacagctcctcatcatcgtcttcctcgtcctcgtcgtcttcttcatcatcctcttcctcttcttcgtcgtagtcctcttccaaatcatcattgttgtcttcaggtagctcctggacccggctccgtgacggatgaaactggccatgcgttctagtatgctgccctggggaccgaagaggtggttgatagagtcgagggggaggaatgatgggagctccttcgtcaaatgcgccttggttgttattcgcatattgttccagctcctcatagtatgcatcgtagaggacctccagctcttcttcaatcgcggttcgttttcttccacaaactgtacaactgcaagagtgcttttgctgttctttcattttcttcaaaacagcgtccttttccaccttgacaagctggcggcgttcttcttcgccgagctcaaaccaaaaggtcctgatattttcgcgttcttcgagagtagactggttccagatgctactatttttaataggctttccggtgaatcgactgatgtatggcatggattgaggcggaggagggtgggcgaaagtcgcggacggggtagaaagcggagttgagctacgctcagcatgattctgagattcggatcgtgctttccgagttttcttcctcttcgatgtctcacccaaggtagcgtggtggccatcggatccgttcattgtgggagatccgcgcggatgttctggtgacacatatccgtaatgaccggtgcttgctgtatggttgcgatcatcggggtaatagtcgtggtcttcatcgtaggagcgctgttcatctgttgctagcaagtccgcatctccggaggcataagcatcaggatgttccgcggctaagcgagcagcttgtttctggcgacgtttctgttttttgcgattcacagaaggcgcagaggtcacggctgatccggtcgatgtgttgccctgaggaccccgcgcgtgggtctcgccgttggttgctggaagaggagttgctgacatatgggtcgccatggtagaggtgaaataagctgcaaggactgcctcagcagcatactaataccaccagagcaagctttgagttagaaaataaggtcagagagtttggggtggtagaatggggaggaaaagcggagaacggaagagccaaagagccctaccaacaaagctccggtgattccacgatctggggttcacttaccggaattattccccttggcgtatccacgcacaaagagtaaagcgcgttctttgttgttttctgaaaatacacttccgcagtgacaaacgtgaggggtgagataggataagaacacgggagggggggtgaaaggcacggcgggtcacgacgtgtctgcgcggattagctgctggagcgcaagtaaaccagcggaggaaaacaaacaatgagtcaaagctatgattgacaaccttgggagatattaatgctgagtgagcgccgaggcaagaggtacgagagatcaaacgatgaatggatggagtgatgggctttctagccttctggctggttgtcgtgccgccgcaacgggatagccgctgcaagcgagctgatgcctgaattgtcaggttgcaatctcgaattgtatgtttgagtaacgggatcgtgcttgaaagaagatatttcaaactttccactggtagcaaagttcagagatcaactgggtcaactcttcagccaagcgatcatgccttggttacaaggttaaacagaagtcacgtctcactgctctcatactgatcactatatggtgagtcacatgataaaatctggtgtccgccttcaatctgcccgcaatatccctccacaccatggcggtgaagatgtaaatagcaaggggaaacaagtatgagcgctcgatccaccgagctgtgtgagacacggagagcgctaattaaaaatatctgccaaggtgataaacaagagagggacaaaaaaagggtccctatagggtgctgaaaccgaaaagatacccatcttttctattaatatttatgtagtcccttcatagtctcggcgtgagccttaaatctccgcttaagaggaattgtaacttccccttcatcttatcttgctcttcagcttcgacctctttcttttcaaaaaaaaaaacttccgctcactcaatttctgcccttctcctctctctttaagccccctatcatttcgaggtgacatcgcctaggcattctcgtgtctacgtcaaacccccccaatcattagcctcagccgcagcgcgaccttttccccctccccaacaatttgtcacgtcactgtttgggtgcatcttcaggccacccattcatctgctctctgtaatccctttgggcactatctgcctcgagctggtctttccttactatccatctcgccaattctcgtaatcagctgaatccgactcggaactccgcgtcatctcgctgatccacaacaccctccgctctcccattacccttgtgtatcacgaaagggttttgcaaccttcataatgtcgcaacagcaggatgataatgtgatgcgaaggtatgtgtagcccatttttaaggtggtgtcttacatccccgctgtatcgcaaggagattatgcaagccgattggaggcggccgcctagcatttcctataccattgccagtgggatggaaggcagaatagtgttcgcatatgctgacttgacgtcttactaggaagcttgtcatcattggagatggtgcatgtggaaaaaccagtttgctcagcgtctttaccctcgggtacttcccaactgtgagtttggtcctcaggcccttataagcaaggtccgtgactaatatgttcttatatgacagcattatgttagtactctcgaattcgatacattccaccccgatcacatgtctgacctctcccccgttaggtaccaacggtattcgaaaactacgtgacggattgccgtgtcgatggccgctcagttcaattggctctgtgggatacggcaggacaagaagattatgaacgcttgcgaccattagcctactcaaaagcccatgtcctcttgattgggttctctgtggatactcctgattcgttggagaatgtgaaacacaaggttcgtctcagattaattgaggaatcggtagtcatactgattttcggtatagtggatcgacgaagcaaacgagcgatgccccggagtaccgattcttttggttggattgaagaaagaccttcgtgaagacccattggcgattgaagaaatgcgcaagaaatcactcaagttcgtgacaacaaaagagggcagtgatatcgcaacgtcgattggagcccgcaaatatcttgaatgctcgtctttgacaggcgagggtgttgatgatgtattcgaagcagctacccgtgctgcattgctcacgttcgacaaacggaaatcgtcttgctgtgtggttatctgatgatgcaatttgggatgtctttctctgccagcgctcggtttttctgttgacttggaacttgattgatacaacttggtgtaaaccatgaagatatcaatcagtactccgttgtatcatgcatcactggtgtttgggaggttcttgtgttcacccagtcgattgatctgggtacgatgtctgctttccggttattttcagccgtgccttttccttgcaggtattttcttacgtctttcctttttgatcaattgtgtatttgtggctgatgcttatgcacgtgcaactccggattcccctccttctcatcgttcaattccccgaagtacattgcgatcccgctcattgtgttctctttttttatgtagtaattccggtccctttgctttcagcgctgatttctcatacattgtgctcacggcccgctcagggtaccatataatcaatttatctcctttctccctatactccttgatatagagtccgagcatatcgcacagaaaaaccataggataactcaagcaaagtctcgtagagcttgaaacgcaaaatgcatagtatatcaagataaaaaaggaaaagcatatgttacatagcgccaaaatgatacatatatcttgggccctccagtcaaatcaacatcaaatccaaccagacaacctctcctcaagacctctacttccttacaggcttcttccagtcatagttccatccatcagaaggtggagaatcggtctgcatgcgagcatactcaatagggaacatatcagtgaagatacccttcttgttcatggagacgcggaacagctttcctccgtcacccgcaccggtgcgcagctcctcgcacgcatcctgcatgctctggtactggcgcatcatctcgagttcgtgcttgcggcgctgctgagcctggaacaattgccacgcgcggtggatggtccagtgtcggaggtaacggttgcgggagaagcggaggggacggggagtgagaggatggtggaggaagtagcggatgagagctagagggttgaaaatggattgttagttttgagttctttttcttttggttggccgtgacgtgtttggtctggttgaggggctttcgggactcgggactcgggtaagagctcggcgcagggacgtgacacatactaatgcgcttatcaactacagagccgccggaggcctttctagcggccattgcgcttgttgtcgagaatggcgctgattgcagggctgctgtgactgggccgggctgttgtggttggcggttcagggtctcgtggcatgcccgggtgattgatgggcggaccggcgccatcgacattgggatcttgaagacattcgcgagggacgcgagggctggtgataaggacctcattctgatggttgtttgttgggtggaaggagtgggaaggactcgatgtaattgagttcgacggggaataattccttgacggcagaatcttgtccgccgatttagccgcgcgcttaacattcccgctacctctttagctgcaacgcatttgtgcttcatataggcatgctcttcttaaataatgatttgatttacttattgaatggctaggaatctaatttgcacaagaaagggttctacgtccgataactggtcaattaagccggtcttgataataataataggtacagatagaaatcgatacttttgagcagagatcatgacttgatatttttgtcgaataataagatagagatattcagcagtatcgagagtcatcaaaggcatcatatgtgaaatgtcccaccaaagccatcaaatagaataccataaacgccatagaatgcagtcgacgcgcgcgccgaagaaagcagaggaagtagggactcaaaatcgagaaatgggctattcaaagctatcaagtggaccgctttgcagcatggtgtttcttagctcgatcgtagttcaaaaccttgcggcgacggtgcgtttgggcgagcttccatcgacaataaagaaccagtgcatccttcaacagaacaaacatgcacccaccaacaacgctgcgaccccagcgggtctggagtagccccaggcggccaccgctcatggttggggatgtccatgacttaggtagaagacacttcaataggccacccactgatgctgagactgctgggaagacgagtgctccgagtacgacatcagcgaaattgctggtatcggcgatgatctcattatgtcggtgcccaagccctagcgggttattgttttgcgcagcatcttgtgggccgtcatcggcatcttcgtcctgctcgacggcagccccaaggtccggttcgtctccatcgcccattcccatttgcagctcaagatcgatctccatcaggatttgtccgttcccattatcaccaaaccggttgagaccctccgcctgatcttgttgctgcgcatcatccaggacttcttctgccgcgcggggttgtacctcggcaatccatttccgttccaagccaccgaatatccgttcgtaaagcgccccgtaaaagctgttgacgtatggcagcgcggcaaacgtcatagccggcgtgggtggccacaagtcaaagtccgggtcctgcccggggttatgtgaagcgaagaaaagaaccggaatagctggaagaaggccttcggcgtatcgagtgcgcgagaatattagaacgagcgggattagcggcaatccaacattcatcccgggattccacgggccctccacagtctcctccatgatctgcctggcttcctcggttccgaaaatgaggtacattgaataaacgccatgcgcgcagcacccggcccaaacagtgccagccattgtaaacattatgccgggaagaaccaatcgacctgctacgcgctcgaataatcgaagtacatcgacgacatagcttcgcgggcgagtgaccacgatttccgtcttgcactgagggcacatcattgttacaccaccgttgcttttccgcgaccgggggttttccatgtccgctagccagtcgagcaggcatgcctcgtgggctgtcaaggcacaagggcagggcgaccgccattccagattcagtggcgagtcttccgtttcatctgtgtagcaaatccagcatttgcgcggctcgtcttcctctgagacatgggggggttttgatgatgaactaagtttgctggaaatatccgattcgtggctcgaggtcgatacgctcttattcaagaaaacggtttcggtgtcctccatcgactcatcctgaggtgagacactctcttgagagatggtagtttcatcgggattggcgggggtggtatcatcgggtggtctgattctgcctggtgcagagtatcccgggacggacgccatcgtagtggggactagctatgcaagtcagggccgatgagagaagtagagagatagttgcggtaatgatctaaatcgggctcgataagagataaagaacggagttcagcatcttctgagtagagaggtgaaacatataaaagccgaaaagcaaataaatgtcttaatttgccccagagcacaagaagagagggagccccattccacttaagtggaggttggaatctcttaagttcggctgtaagccgcggctgtcaaaggcggtcacgtgggggcaatcacgtcacagacccaagctcaaaccggaaatggcaaatgatcgtcgggcgtatagatgtagatttactttctaattcacttttgagtatatatgatatactaccgttcagtgagatacaatagttcgaccattgctcttagtcctcctatattacttccttccaggttaatgacagcgctcagctctctgtgtcctaatcgtcgtcctgtgttctgaggccgtggtggacatggtgatggtgatagtagtgtttttcctggtctagttgaccgaagagcagaactagctaggcactaaattggactttggggcatgttgcagttttaatacacacccatagatatctgtgttgtgtttgcccctgcatggcaagcccatatacgaggatattgaaaagttaacctttgatttggtcgaatatggaatactactccacacagctgtctacatagaccgatggataagaaatttgaatttgaataaagtagcaaatcatcattaaaaaagcagaaagtaataaggcttgatctggcgatctggtgatcaggggtggaaaagcaacatcatagaagagcgaggggtagctaatccacacacccaactaactacagttcagggtgaatgctaccgtcagactccctctttccgtcagctgatgcagccatttcttccagggcatcatccagattagttgggactgagacagattcaggcgaccccgcgggaacagctgcaggttcagcggactttgtcacgtccatgtcgtccttgccctcctgcttatctgccgattcggttgctatgggagacgatccagccgatttcgaggtctctgctggggtctgtatagggtagacatccgctgttgtggtcctgggcgaggtcatgtcctctaaaaccggagattcaggtgttgggtctacagattcaccggcggtattcttggcaattggaggggccattgggcgttcagcagtcaccgacggttccttcactgcaacggcagacttctcttccttcttactggttccaacaacaacctttccatcctggtcgacctgccagatattcaaagcttctgtgatcttgatctctgggatagtggggagcgtgggactggttttctcgacggctggcttgcgtcgtgctggtccacgggctcttcccttacgagcatcgctgagaggctgcttctcaaccggcacctcgggctccttttcctgaggctttggctgctgcggacccagctgcagacgtgaattcagatcagtgaggaagcccgccttcatggctgcaattttgctcccgcctggacgaccaggaattgcgggcttggccttaactgcaggagcatctttcgaggcttcagcggtggttcctgcggcctgggaactgggcttagcaggacgggtagggacctgaggcttgggtctgcctggaattgatggtggttggcgcttttcggtcggtgaggtagactgaggctgtctctgcgggcgcgggggaattccaggcctggaaggtacttccggacttttcaattcttcttttgcaggctcaattgtggtcaccagctgttgactatcaggggcatcttcccaaatatctctactggggaaacgctgtttcaaagtgtcgggtcgcgcgggagtcttatccctgccgttctcgccttccaggatgagggcggccacccgatgagagtcgactttggcgttctgcatcttgcgtttggcctcttgctcgggtgtttcgaagacttcggcagagtctcgcttaggcagatctggggtggtgacggtggcctgaagctgcagactgttcggggtatcctcccagatatcctggctagggaatctgtgcttgagtgtgtcaggccttttcttgaagcgatccgcagctgacacgggtttccctttcttagcatcctcttcagggaacaacggttcatactcctcgacgtcttcaagaggtgtatacgtatcctcgcgcgagtcaaagcgggttagttggccttgcacacttgccgaccgactgttggaacgactgttggaacgactgtgggaactaggggttcgactgcggccatcatcctcgaagcttggtcgacgatcaaatgacggcgagacggcgggatgcaagtacgccgactcggggcgcacttcatcagcagccaaaattggctcatcgtcctccacggcgttctcatatgtcggctcattctcttccagcgccggggtggcggcgaatccatccggatggtgcaaaggatgcatcggatcatccacgtggatcacgccaccatcacgatgaccatgcgaactggatctacgttgatgcagtggccttgcggtagtttgcttctgcgttgcttctgaagggaaactcatctgtcgaagtggcgactcaacagtcggttggctttcgaatcgaccgtcgggagggggagaagcaatttgctgtatgtactcgtcggacgctatatatccgacctcttcttcgggggtacccacgatggatggggaagtacctagctacagttagctttcaatcggcagcacaattgcttcaaatactcaccaagaccggaaccagtctgggccgagcttcgaacaatcttgttcagatcatcgctgctcattgcccaatcgggacgcggagtgccgacaccagggccatattttccttcttccttcacgaattcatcgggatgcttttcataccaagccttctcaaacttatcgggatgctgaacaccatgtccatgcaatccatagctaccagggggcagtgaagagtcccgagcactacgagtgcggttgtggttacggctggaccgctgcgagccttgttcgaggtacgggctgggggatggtgcctggacgtcaccggcatttggatacatgggcacgcggaacccctgctcatctcccatgtgggcagagtgtcggcgctcattggatgcagttgatccggtgcgtgaaccactcgttcgggaatgcagtgaacgacttgaacgttctagttcctcgcgagcaggcgaaacaccacggcctagtcctgccgcagcagcctggcgggaatcagtccgggtgacacctcggactcttgcttccgcacttgatatcggcaacgaaggtctcggtgcatggatcttaagatcactgccaacattgcgagtctccgcaggtgtctggtgatgggtatccgacatgtttcctgggtcgagatccgcatattcaataccctcctcgccgagggacggtatcgtgacgctgggaggacgtggaggcaaatcatttgaaacggtgcgactcatgctaggaccggtccattcattgaacggcgaaggtgcatagctatcacgcatgggcgaagccgaacgatcactgcggcgattgcccgggcgcggcggtatcttgggcatttctgacgacgatgacgctgccggcggttttggagatcgggccggtcgaggaggaatgaccggagcaggttgggacatgatgaagttctgggagctgttgacaagtcagcgactgcccaaccggataccccgcgaatacgcttggccttatgcgggctcaaaacaacaatggacacacggctccaatgaattgcagggattaaggcaactactatggatatgcagcaaattgatgcaaggttctcaagaagagagagcctagccatgcgactgataagagtatacggaatgatttgcttacccggatatggtgagaattagtttgaatccaattggaatgacagtgaaaatgtgcaatgagaacagttaagaactgcacggaagtagatattgaagcaattccgaatctgagttttaggaaagagagatgatgtatgctctttctgccacgcctgacgtgctctgaccgcaagagataatgcgcgtattgtactaatacagtatcattacatgttatataagagccaactacgacgatccgttaactcaacgccccgccgatgagatcaatatagggcactttcgcttcttttgttgaggtcctataaatggcttctatctgtggtcaatattggtcttaaaataatgcctgtttctctaaaattatacctttacccgagtgaccgtctcagctcagatcaaacattgatcacatgttctttatactgtacaagatatctaaaaatcagctgaagtatcttacaagtacttattccgtagtctagaacttgatatcggacttattctttgacctttgacttctcatgataagatgatttctctgtcgttggattggctgactcgaccgaggcggtgaagtgtaatgactttccacattgcatcatcgttggctatttatacaactcgactaaccctacattgtacacttcattctaagatcaatggacattcttaacatatatgtgcactaccctaggagctttcagtctcgactctctaggtatcgctttcctttgaccttgtcatacctttaatcactaggatacaccgatctgttcaacaatgagatccactcactaaccgaaacagcgagaatacacgccacatattgatcaccagggctaaaaagaatttgcggggcaatatgacctgtgacgaaaattccaagctccatcccactatttgcgtcacgttcctgtatattattctgtctatgattcaggctagacgacggcttgtctcgtgtagcaagctggacggattgcagcctagccgggtcgcctaagtttcaagattgtcagggtgcaaattaccagatatgggatagttacatagagtgcatatacaatgtaggctgatacccaaccctaattctgccaaatacattcaatctacatctatttccatctggtcctattggtgacacttttcagggccaagcgggtatatattcacttccgtataaacgatagatttgaatttggactcttccggattcgttctttgcaatcccatccccgccaccctatctgtgggggagcgacccggggcggggttggtgcccgaatgccgtttgaagcacgattcactatccttggagtaaatatttctccgatctttaggtagaggtgaggctgacataagtatgaaataatattaggacgaacagacgttggacagtgtgggctgcttttaaacgcctgttcgcccgctccttggccctgatctatgcttcaacgcttagattccaccttctatttcagcactgcctgtccaagacgaactaggtcgttattcttaaccgtttcctgatcgaatcccttcacagccaagtctagaactgccgccgaaagctcttcccgatcaatatttgggattgtgcgcgtgaaagcgttaaggacatggaacaccgaggccagtacagatctcccaaaagtagtggaattgaccactactccgggttgagcgatacagatctcgacccccgggtactcttcaggaagcttgataaccatgagctctgtttcgcactaagaagcagatcgtctttagcataagaacagacagactcgtgcaactataactcacgcgcatgacttgatagtcacccatgatggctggccttttgatcggatctctgggtgtaccatcggcactgaagtagatgaaacggaagggtttcgcgggaccggcctcgtacatggccttgaatcccgcgagagtgcagtcttgacacacgcgcttgacctcagcaaagtcaaagctgcttgttctgaatggtgtcacagcgaccgtccttaaaggcagcacgagttagtgggcttttttttccattcttaattgccataatatcaacgagagtaggattgcgtaccatatgcaggcgtccgccccggcgaactcagccttcacatcagcagaatactccccgtagtctcgaatgacgacactcttaagcttcgacgtcgggtctgttccttcttcaacttggacgggcttccgagctagtgcgataacctgggtgatctcgttgatttgcaggcattgcttaatgatctccgagcccaccagaccggttgcaccagctacaatgagcttcatggtgagagtatctcaagttcggtaaagttgtcgggtattagttacacagggacgggaatgattaatcaacgttaggagaatgcagaggttacaatttccaggggatactacttatagatcccgtcgggattcgggcccaatcccgttcggtcagtccgtcattggactctagaacctgcccatgtgggctacctatccaactctgtattagaatagcagtctgatgcgatttcaacgactccgtttatgtccagcgctcctacctgagggagcttatatttctaggtgggctgggccacggctctcttttctgctacaaaggtccctttccagcggccccgggtgctgtatgatgccgtcgttaggaaaaacagttatgcaatttcaataggtccagcggggatctggccgaagatgccacccgaccgaaattccctcaaccagcggtacggacgggcacgtacatcttacctctgacatcctgtccgttatagtcattctgatggattgactgactgatagataggcctgtgcaaggcgttcccaatctaaatgtaaatgtgtcccgagacctggtagccaaagctgtgagaggtattattgtctaaagaaaccctgcctgtgagatacatcaagtctccgacaagctgtatggaccattttactgcgttgattgcaatcgcaccattcttcgacgatttcgttgatcgcaggggacgtatagagggcggtttcgaccccgagtggtcgtatggatttggctgtaaaccaggctgctcaattagatggcatagcttatgtggcaacccttgttcgtggagaaacgagttgcatatcaaagcttatgccagtaagtaagtgggcaccgtgtccggagtctagattcacgatccccagctgcgaaaatggatccaagcccaatgccgaatgccgatctactgcatgaaatcgagggacagctggctccgggcagctggatagccaataatatatgggatttaatcaaagttgggttcgtaattgcgggccgtaccccgactcatcgggaatggcgccgatcccgacgaggctgtctcatattggagacgctcgggcggtttccaagaccaacagtcgcaatgttgggggcattgctcagcccgttctcaacaagataccgaaaccgaaaggatattgtcaagtggaaattgtggtgaagagtagggcgggtgagcagggtactgggaagtgagagctggatggactgttacaggcagccctcgctaacacaaaccgccatttgatactattagtaatcataccgcgaaaacacccggttgctatgccaaaaatcccaatcgtagtaggtatagctcttttacgttgaagggacaggggagattacaggacagcgtattaggagctaagccggaaatggcaacatgtacgtatagttacccaagtatcgcccgaatgaggagctactatgtacctaatgggtctgggcgcttttacgttagatacccaagtgtcagagttgatacctacagaaataggccatcatccacgcgcttctaaaccccgaagaatccgaagagcttccgtttcactagatctataacatacagctgaagtcatactgagtctcgtctgatattgtggcggaattgagcttggtcaaagaatacacctttgaagatagatatcggaacacctattctggcggacgcagtccacaaaaagaaaggaaaccacagatatatctgctataggaacgctcatcgactttgaaaacaaacatgtccagcgggatcatcctgaaccaaaccgaggcatacaagtacagcacaataaaaacataaaaactatttcatagcacatcccaatgcatgctgcccaaatggcattttatctctgcaccatctgcaccgagcatttcatcgtgtcgcacgaacctccattccccaggaccaatcccaaaatggatacagctggtatataacaagacaggaacggctcggtgtgaacatcataccatcagacaatcatctgtgcaactccctggccacctagggtcttgctaccaacaaactcttgcttcgtcaggcctgcgagtgcatagaaaacagacgcgatgagaaggaagacggcaccagcaatcaagctagaagccctttcggcaagactgataagttggacaccaccaaggacggcgtaaatgagggcgcgcatccagttagttgtgaagcggcggataaaggaatcgaaggtcgaggatgtgggacaaattcggaggaggaagggcacttctatgaagagaatgacgaatgccgaggcactgagacacgttaggcttcgcaatgaatcgcgagaaatgaatgcgactcacatgctgatgacactgatgataatcagaaccacgttgaatgaaaagatgttcgcaatccctagcgcaaggcaaaggataatgcatagcacacccgtcctagatcttgcgtcagaccgattcatttatatgcgcaagtgattttcgggagtgattgaagggtccaggccacctcacgaggtagcaaatggcatttgatcatttgatcaaaatgcgaaatgctctctcatgacattattcaggcttgtaaggacacggagtgttaagaggcaacgcggtagactaaccattgtccatagatgcctaagaagaccagcacggttagcaggttgagatatggtattgcagaatgtgggaacttactgaaatttcgcgatttgaactcctcagctagcgtcatggtgggctagcgaaaagaatctggggaacaagagctgaagatcacagatgggggtattcgcggatgatcagaggtgtcagagggtccggcaaagtgtacacgcggctgatccagggcggtcaaaacaaacaaaacgggcaggaacgatcgataattttcacaaggtgaaagaaagatctggggattatgacattcacttatgcagtgttgtaaatgtttctaaagcttttgataggatcatcccgaggtcgttttctacgccaagtcaaattccaccccctactaatcaccaggcagacgccaatggtcaagaccccatatagtcggtctctagggctgatatttccacttattccaacgcgtaacacattcacggtctatttttggaattctcaaagaagctggttgaataatcaatgaaatcactactcactaacatcttgaattggttgtttggttgtaacattttgcgaatctgcttctttgtatatattgcaagagaagagcactttacaaaatccgaacaacgtaagatctactccagagctggaaatatagtttgagggatatataatattgtagtcgtgtccttttattttgaaaaataacacaacatattattagaacacagtcacgaacgaatagcatttcgagtgcgatgccttaagctatcagtatgctaggtctgataggatctttatctctcagctttctgcattagctcagagtgtgaaatttgggtgaagtatcttcttcgtcaaagtcaagaccaataaattctagctatactgcgataaaatccacgacatggacggtacccggaacccagtttctactctctgcgtgtatttatgtatatagaaattgagagagatgtctagttatatcaagggagtagtcaaaggagtacgtaatgtaaaccaaacatttcgtgtccaggtgagcgatagcacgttcactctctaccatccaatcatcagttcttgtatttacctcaaagcatgtatctaaagaacggagagcgatcgcccagcgagtcgggattctcaggatactccgaaggatccatggcatcccgcttccggttaacacgctggtatgccatacgtagaatgacagctgctgtcatgcccacgacaacgaatgcaagttcaagagagtgaccaaggatgtaattcggcgcatcttgagcacggtagaagtttgaggacatagctgttgagtgaagagtattagtttgtttgtcaaactcccaattgatgcgcgatccttacctcctgccaggttgcctactccgatgtaaatagccatgccggcagcacgcttgtagtcgcctgccatattcacactgagccatgtgacgtttccggggaatgctggataaattccttttgttgtgttagctggaggataagtgtgcggaggtttgtaaattcttaccgacaaccgccaggaaaataccaaagtacataacacctgggactccccgaccagtagacgcgagacagatgataaagccgataccaatcatgcccataaagaagagaatgaatggggatcgctgcttgcgcctgtctgatacccaggctgcaataacagcgataaccgctgcagtgatataaattggtacctaacataatgatgtcaatctccgcttcattatgaagtagctcagggaccttactgtaaggagctgggcagttgaagccttatagcctaggtccttgatgattgaaggaaggaaaagggaaatgccgtatagcggacaagtgataccccagtacactttccacgaatcagtgaataatacattgaatagccgaggacgaacagaacttaccgaatagacccaaccaaatttgccagtcggtgaaagcatcgatgacatagcgcatttcgaacttatcattcgtttgatcaatttcgcgggaatctgccgagttttgaattcgcaaactgtggatcacaaatcgacgctcttcttcagtcaaaaaagtggcagtttccggggagtcgtgaatcgcaaatggggctatgagtgccacaataactgtaagaagaccttcaagaatgaaaatccatctccagccagcgtatccgccgacaccatccattttctaggaatttcgagacacattagtgaaaagaatttcattgctgtcagcaaggagaatacatacagcgatagcgtatgcaagaagcccagagaatgcacccgcaacactggcggcactaaagaagagagcttgtctaaactgtgctcgatggcgtggataccagagtgtaatgtagtatgctacaccgggatacaatccggcttctatctcgtttcattgcaatcattagtcttgactagaacaaggtggaggttggaaggagggtagacatcaacatacctgcaatgcccaaaaataatcgagctgcgagtagtccaccgtaatctttgacgactcccatcaaggtctgtgtaacatctcattaaatgctgtttgcgatcacccagaaattatgtgcgcacttaccataacaattccccaagcgaccatgatcaaggggagccatctcgatggtcttaacttctttagaagtaggttgctaggaagttcgaaaacgcagtaggtgaagaagaagacggtcactacccacaatcatatgtcaattggccattcttccttgaaatcaaatagccaaaggggttcatcatacaagtccaattgtattgcggtcccgtcatacggagatcgtcaacaagcccctctatctttgcatttccgatattcccacggtccaagaaggccagcagatatagcatgctcagcatgggaatgagacggatgtccatcttccggaggatagccttttcatcaaccccctcaaaggtcggtgagccgaggctggatgactccgcatctgtgacaagtccatcttgcttgagatcggcgctgaatagggagtcttgggtgggtgtatcctcgaagtgttgtggaggggtcttctccggagtgttctttgaatcagccatggtgaacaaagagagatgagagaagagggaaatcaaccagcgcgggacatcgttttccgagtatttatacctatcctgaataagcttagcctaacccggggtaagtccgaaaactggggatatcccttggcatgaggggtaccacatcgggataacacattggggtacttccttggcggttgaccggcctcgacgattcatttgaccccgaaaggaatgttgagcggcgagtctattgattctgggaacttttactagaggtttaatatctcacatagtgggttatatcaaaaaggactacggagtacctatgtggggagtacccgatatgcggggggacacggtccacccatcgtgacttgcggcacaacttgcggcacttaaatactgtaatgaccatactgtagcacagtctgcttcctatgtcgactgacagtataaacagccttatctggggctttgggttgtatccataatccaatgttaaggcagaggccctctcccagatccaccacgatttccaaggttcaaagtcagatcatttttatcaatccatggatatacatcaactggcttaaattgagtgccaacatgctaccagcgacgcaatactacttatgcgaagcccgtcctacccaaaggagggagactaccgagacgttatggatatctcaattgattcccataaagcactgtgttctaattgagatacgctaacatgtgccctagaaaacaggagcgatatcgacgcaacaactccagcaatctggttgagcagcaggtgtagtgcaacccaaagtaatattaccaaattccctatgtgtgtaccattccagaagagggctggtaaaaacgactggatcacatacactcgcgtttggagggttctgcggatggttggtgagtgtggcaattagtcgcgatgaaggggaacaattgtggaactggacacatacataccacgactgtagacgagcataggagagcagccggccagcagccctgggtacagagcttgtaattcgcgcccgaagaaataggaatgaatgcgggaatcacgaagctttcgagagtattgtttgtgggtagggcttgggtttttagaaagagcaaggctaggaccgatgagatggtgagttgcattgtgttttgggaaggtgagggtctcttcgtacaagccaatctcaatacaagcgtggggttcaaagattgggaacggaatctaaggagcagcttgcggttcttatttatagccaagtctagccgttgtgctgccgttgtgctaccggattatgcttgttcaacctggactcatgaagaaccaattgaggcattggatcgctcgagaaatcctaaatgatgttcttactagccaatgttccaatctcatcctgccaatacaattaattatagtaaacaatatcctaatactcatcagatagaggctcgaccttacagtatcgagggcacttagccatatttgcccctagagttatatcatcatagcatagcaccacaacctcttcctcgaccagattggccacagttactatcactcaagaccatatcattcaaggtcacctcccatttacaacaccgccaatttccaaagcacaatggcaccaggcccgtcgaccaaacccgacacaagtacacaatgggacgacgcatcgccaatatgtggatagccgccggcttccccgtaatcctatgcgagaaagcgggcaactacagcagcgcagtgcgctacattgaggaacacaaggcgaacaagccgctgaactaggcacgcaccccgctaagttggaaacaacatcctccctaccagaagccgtcaaagacgcatggatggtcgccgaagctatcccggagaacctggacatgaaaatcgcgattatgacagagctggataaaaacgccccaccggactgcataatcgccagcaactcgtcatcgctgcggagccgtcagatatcatcaataccaagaataattaccgcatctgcaatggtcactattacatgccgccggaccagctgtgctacgaggtcatgtcgtgtggctacacggatcccgagatctttccgtttttgatggagaagctgcccaggctgggctcaagcctgtgcatgctaaggttgagtctactggactggtgtttaatcgtatttgagcgtcgcttaagcgggaaatttgccttgtcctggctgacggcgccagtgatgctcataccgttgatgacatgttcaagagttggttcaacgctaccaagggtccttgcgaaatgatggataccgtgtacaatattgaggctgtctatagtcaacagcgtgatctggatagcactgccacggattggctgaagaagaattatgttggtaagggaaatttgggtgccaaagctggaacgggtttacttggataaatagagatcattatcgactaattttcattttgcaagataaaagataaaagtgttttagaatagaccattgaaactgcagttctgagagttatgacgagacaccaactggaactaatgatttattgggtataagatataactgcactctcgattccgggagtatataggaacgacccacgtcgcctcagacagtccattacagcatgacaatgaactgcagatcttcgacgacagactatgaaacacgattcggaccaaataggcgacggtgacaagggagaagatgaccctcggagccaagtcgccagagtgatgtacaagaggtaaagataaaacgaaacgaccaaaataaagtaaaatagggcatgagggtaggtatcgggggtccaaggaaaaccggccagggaatcaacggtcatcagaagtattaatatgcaggagacataatgataaaaattaggcaaggaacgtagtaaagtgagggggcaatcagaatagcacgacggcaacagataagtgtgctctgaaacctcagaggaaagggtatagagtgaagggcattaggagcaggccccagggtgtgacttgcaatcattagggtgtagcacaggcatagggccatcagcgcagagggaggggttgagcagtgaagaaacagccaaactaggttaaagacaatcgcgcgggcgaaaccttgaccaaagaaacaataattaaggggattttctgcgatgatggactttccactctgctttagcgacacgcataaacaattcagtgtctttgatgggaacccagctggtgaggactttcatgatattctcaaagtcggactcgagaatgatgtcacgcatgccatcaataagggcagcagatgaagcatgcaagacgtcaaggccttggccaaatgtccttacgttatcattagtggggactttgttcttcgatccggaggatacggagcggccagtgttgtcttcggcatcaccaaggagcatgaagacatcccacacccgaagttgagctgggaaggggatcgagtaattgaaaagtgtgaggtaccagcgagtgccgtaggctgtgggtgggattccgacctcgttctgaaaaattaagcgttagtagacactcctcgtgtttcgagcgagattgacttaccagtttcgtggccacttcacctccggcgagccactctcgttcaaagtcggccaaggcctccattagtccagcaaagccggatttgtacagctcttccagacctcgcagctgccacaatctgacgagcataataaaagaatgctcctcatcgtaatatgctagtaacgtagccgcgagagttgccattccctgtacgtagccagtgtcagggaaatatagtgacatggcgtgaaggacacggaacaatagtctttggccaccccgatagcgcctccgaaacattatatggctggagatagttcgcggtacatcgatatcaatctggacatcgtccggtgatgagatgaactggagttcattgaaggcttcgatgagctcgtccgcaggtgcgctgcctttgtggcgccgggcactggcttcaaggaatgagtaccaggccgttgaccgccaccgatctggaatgcctttccaagttcgctcgattaactttgagctctgagtatcgaactcaaaggtcataccgccgccgtccttggtcttcttagtcggcttagccatcttggtccatttgtcctcacgtcgccactccttccttcgcatcgcgcgagtaagtggtgcaccttccttctcaccagatggagtgggtagagtgagcatgtcagccgcctcatctttggcttttcggtctcggttgtgaggcaaatgattggtagcggcacgcatacgagatgtcgagcggcgcaatggcggaccatagttgctctgtgatgaagatggacgcgcactcatagaagtttgggatattttgcggactagagacgcaccattgaaagaacggttactggctggagcggttggtggacgaattgaacgtttccggcgaggtgtctcagaagctaacagaaggctagttgtaactcgctggagcgggtttatatcggaacccttggagttctttgcagggcgaatgaagccataacgatcgacttcttctgcaccgacattttgccaatattcagcaccacctgctagctcctgtgtttccctcttaattcgcatacgctccacttcgccagacgtccttggtttgagttcattcccagcctcatccgtctgagcagagtgtgtttcagaggtttcagtatccgggaccgcaccctcttcccacaagactccgttctctgaggccattgctctcgcaacctcggagtcggtaacattttcttcgcccttctcatacatcagcctaactcgccgtgacaacatatcttcgtcagccgagattgctctgctgggaagactagtctgtctcgggcgaagagtgccttgaggtttgacgtgccgtggaactgctttcggtgctccgttctctccttctggcttgctcatggtaatggcagggggtggcgcactttcagatgtctgtcgatccaactgtggatcgcaatccacatccgatatttcctgggctggtcggcctaattcttgacagggtttctgaagaggctcctcttcttctagatttttgtggggcgagtctggttgttcgggctgctcttccagcttctcctggggtgtttttgggcgcggacgtttcgcatcactcttgatcagacttccacgattggaaaactttagcgacttatccagaccacccaaagaggccgtcggtatttctaagggaataccagcgaaagggtgctcgatttgaggcactggcggagcctcttccaagctaagtctcctctccatctcgagtgaccgtttccttaaaccaccccactttctttctgaccatcgagagcctggcctcgagcctggcctcgagcccggccgtgagctaggacggaagtttggttcattcaccagaatgctaggcacgctgcgcaaggagggcgcgccctccgaccgaatcgttcgagtttcgtcaccaacggacacggatggtgcgagccgggagaacatgagcacggatgcacgatcattactcggaccggctgacgcggcgctcgtgcttaaagatcggccattggaggctattggcgcatcggctgtgggcaacgagcccgaccggattgcaagaggggcgtcaacggtattttcaaagggcacggcgtgaatcgtcggattggactccgatcgatcgtgcgataacgatacagaaacctcattcaccattatcccggcatgacttgcgaatctgcgcgtgggctagaatcgcgtgaaagaaaggagtgtagggacgaggcgaaaggggtggaggccagattaagcgaaaatggggatcaaagtagaaaggagcgacaaggggaaaatcacaaaggaagttcagtagaacagaatctccagaattaaaattgagagatacctggaggcgtggagttattttgggtcggtcttggcgctctccaggtcagttctggccttcaacggggcatcttcggagtttccgtcatctcctggctacatgtaacacgtatatctatgtaaatagtatacgtatacgtgttcaaaatatctatgtagcctgactatctccctaccatcctatgagggattctcaacgtccctcttctccctcatttctccctcaaaatagatatcaaggggtttgtcccacctctatgggccgtgtgtggatcgtgagagaacaaggagtgtaagtggagtacgctagttcgactccgtaagttgcttacattagaatgcccaacggtgggatgtgacatgaagaggtaagctgtttaattgtatccgcgtatacccaactatggagtacatggaacaacacagagtatgttgtagatgctgttgaaaccctcaattccccaatacgccccagatgtacaaaacacgtggaactcctgtagccgaggcttggacaaccggccgttagctgtcaatgctcaatgtagtcaaaaggggaaaatacccccagctagaaccaacgtaaaaaaaagtatcatgagggcgtgaaacggtcaatgcagtgacccagtgttaaatgcagctcaactcatagctgctgacccgatggcgagtcgcgatttggtcgagtccgatccacaggctctttaggcaagagttcgatctgacggaccaggaagctcttctcatccataaattgatcgtcgtcagttcggtcctccaagaacttaggcaaaaacctcaacagtcgatcacggttattgatcagaattcgttgcactgccaccgatttggtcggattggcaacaaacacctagtcccttatcagagcaagccctcgtctgttttcggagccatttgagggcaaccttaccttgaacacatgaaacccttcgtattgtaccatcttgcgatcgtcccgtagcagtttcatgcagagcttgagattatctccactctccacgtatgccatcatcacgttgtagttcgcacggtccaataggatctcccccagaagtttgatgctttgacgcttggtcacatacgagtccgagtggaccaggatgttattaaaccgcccgaaaaatagttcaaaattggctgcgaggtacgaggtcacgaggctcttatggtgggtcaaaatctcctgtagaagatatgccagtcagtcacttattatcaaccttggaataggataggtatcgttctggaaattaccctgaatgtcgtgaacgcatctgcgctgacttcgaaattgctcttgtcgatccaatcaaaaaatctccagaacacaccatctcctctctgcggctggttgggcttcacgtcggatagtcgtatggccggctctccttcattggattgatcatacaaaacaatcgcagtgatgacatcgaatttcaatgcctctcggagaatgacaccacatggcattgcactttgactctgcatgtagccccggcataactcgacgatgatttctggtcgatggtggacaaggtatgaaatgacgggaggatctttttcggcggcatatgaattaggtcggaaccgaagtatatgggagaacacggtctgggtgtcttttctggcttcgaagggaagtaaatggatgctttgggctagatcaaagagtagatcttcctgaagggttgcttgtacgagtgcatggacttgatccacagacgcggcgacctctaaaacagaagattgttgggttaattttacattgctcgttaggtgctacttccaggatacccacctggtgttccttggactatcaccttcatttgactgagttgcttagccagctcctcttcggcctagttcattcattagtcgattgttctccccagctggatgtctccaaacgaaccttgggagcattctgggagtcatggatcctcagtaatagctccttggttgtccggacgatatcagcaggttgccgagaccggccgcgattgaaaaagaaagccatggtgagatgggaagaatatgcggcaaatttagaaagaaactggagatgaatgcgacatgggataagttatgattgcaacggaagaatcaagatcgagtccaaggggaagcaaatgtgatgtattcgattgcaagttgcccaggtgcgaataaacaaaccggcggggcaacggggaacttaccgcctaggcacacgccgataacgtttttttttttttttacgataaggttgacacagaaatatgatcatgatacatagcttgatagccaaatccttgagagcttgtacataaacatgtcgtgaccctcacaacacttcatactccggtttcattctttccaccatggaacctgaacttacaaaaaatgtcagaaactctgaacatgacgagccgtgagtctttctttcacttcgacattaataccattttgccatttataagggtattcaagaacttacaagccctaattcaaatacgcctgttctctctatcgagatagcacctagtatcactgtctcccttaattgccccttgggtatcctcgttacagttcaccgagaggaagatggcatcaataagccctgcatttcccgctgggacgtgcactgtgacgcatggggtcctttgggctttatgctcttcagacatacaccacaaggtctgaaaaatatcgaaggaaatcaccgttccgagactttggagtatacagaatgggatgggcattttgataggcttctccctggccaatgtctccgaaggaacttagtgacctcctcccagtttgcaatcagctgatcccatgtgagaaataagagctgctctaaccaggcgctgaatatgctcttggtcgagtttgttgtcgttgacaacacataagattcctagcataggcttactgcttgctatcttatttcccgatcaagagatctattctgtagtatactccgtagttataatcttaaaaccactagttactccgtacaacttaactaacaagtgaggctaactgaccgattatcatatcacgtgttttagtggatcaccggtcatccatggatgggtcccataggtcagatcaaatgtcgtctccgctttttttttctgtatcaaaatgatctctgcccctccccctccaaggttgaaacaatttgttattgtcttataattcatgtcagcctctaatatcgtgaacccacccgtgggtgagagtttccctgactcccagtcagtatcggattcgtccgattccagcaacgaggagggctgggaagatgtcgaacccgatgaggagtcgcagcctgtggttggccttttcactagccaggtcttccccgatgcgcgctcaatgctgaaggagtgcaaggaaaagtacaatttcgatctgctgaagattcagaaggaccttggtatttccggcttctactcttgcgggattcaacaattgaggctaacttctttttcccgcttttagatttggatttcctcgacaacatcaagttggtcaactacgtccgtactgaagtcaagaacggaaacaaaaaccctgatgtctcttccaagtccaagttcgaggatgaggtctatctcaagcccgttttggaggatgacgctctcttgtatagcttggacgaccttaccgaagagcaggtcgaacatgctgtccccgccaccgagacaaaccgacaggttctcgaactccaggagaacttggagcgattgcagacccaattctccgagtaccgtcttgctgtgcagaagtcgatggatgaccaattgtcgaaagaggatgataagcttgcagaatccaaccctctgccctcagctaaggctgtcgacagactgcaggatgctgaagatggatatttcgtatcttacgcttacaacggtagggtttctcgttgaaccttcgatgcatataatactaacatagtccaaaggcattcatgaatctatgctcaaggacaccatccgtaccgactcttaccgcgatttcgtctacgaaaacaagcacgttttcaaggacaaggttgttcttgatgttggctgtggcactggtattttgtccatgttctgtgccaaggctggcgcaaagaaggtcattgctgtggacaactcgaacatcattgaccgagctaaggaaatcgttcatgacaatggccttgaagatgtgatcacgtagggctcataatcatcccgcaatgaagagacagtactaactcatattaggtgtatccgtggaaagatcgaagaagttactttgcccgtcgaaaaggttgacatcatcatctctgaatggatgggctatggtcttctttttgaagccatgtttgattccgtcatctacgccagagatcgttatctcgcccccgatggtcttatggctccttcgcatgctaccctgcgccttgctccctatgccgacccggatttcatcgcgtcgcacatctccttctggaacaatgtctatggtttcaagatggacagcatgcttcacaaaatctatgatgaggctgtggtccgcagcaaccagcccacgactattgtcggagagtctcagattttcttgactcttccgctgcacaccatcactgtcgaggagctgtcgttcctgaaggaattcaaggtcacattgaaccaggatattgatgccttggatggatgggctatctggttcgacatcttcttcatgccctccagagagtccgttctacctgagaatgccatcccctcagatatgcaaaagaagggaattgtctcgttcaccactggtcctgatggaaccgagacccattggcagcagactgtccttctcattgaccatgccaaggatcatggtaaacaaggttcccaggccttgaagaagggccagctcatcaccggcaaaattggttacgagaagacggagaagggctctcgaggagtggacatcagtgttcagtgggagtccgatgcaaatgagaagggggtccaactatggagccttgtataggatcgactgatcttttgatacgttttctgatgaactaaaagagatatgaccacctacatagaaaaggacggccctattatctaggtgtcgtttatttgacctagtgaatacaaaatgattcagatttaggaacaagcaatgtaatgggtatctttgtcgtaattcaggtcatgatctcgtataaaaaatagaacatctaggattgattcttcgcttcggggatttcccgcctagcagtctcaggacgtttatcgtgacgatgactatgactgcgatgagaggagtggtgatgagagcgacgatgagagcgatggtgtgagcgatctcgacttgaatcttgacggcgacgatgatgtctgtcagaacttcttctgttcttctcacgttctctgtctggcgcatccaatttgaacccatcgaggctgttcactgacggggatcgccttcgccgatggcttgactgccgtgcctcttcggatttcaaaatttcgatttctcttcgcttttcgtcattccatcgcttccgttcctgctctgttgttttcaactgacgcacaccccgctttatggctgcgagtgggtcattcgcactcatacgagcctgtgtcctctctttgcgccttggatcctcgttaccccacacatctttctcgggcattgaccctggcgctgttacatcttgttccgtagaggaataccacggtttctgaccaatagtctccttgaagcctgcggcgttggaaaacctcattgtgtattggtcttcatagctgcgtttcttgcgtgccgcttcagcctccgcttcgatatttttttcagttttcgcacttgtggctgggaaaagattgatatggccggctttgtctagaatcggtgcttgtgctgcgtcagccttgcgagaggcgagcatcaactcttcctgcttagcaactgcttgtgccgcatcctcccgagcgtagcgtatatctcgatccgtgtcatcttccccagcaactcgccttctcttacgaaatcctccagcatcgctggtggactttctgtctgaccgagccccgggttcagatgacagatgggagggcgccggtggaggtgtaggcggccgttcgccgcgaagaattttgatcctgcgttcggcatcgacctcctgcatgatgcgttcatcttcttcctcgcgggcttttgcttgcgcctcgtcgcgcctgacgcgcgcgacattatcgacattgtaaacgttccatgactttttgccgaggagatggctatgagataattagccgctttcgcaaatatcataaaatcgaaagaaaatatccacttacagaggcatcttgcaaattggctgactgttgtatggacgcgctcgatagcaaagagctggtcttatcgataatgacgtccccacgggccgacgctgttcccggtggccaaagtggccccgtctacagctctacggttccaaccctcttctcttcccttcatgattaatttgctttggatatcagcatatatccagtaaattcttggacatcacattctgagaattaatcctaggtcatccgcgctgcagagccgactgacttatagttgcctgctcctttgtcgacactgtcgctaaagcaatagtttcaacggttctccggtcaacctctctgattagcgacaatcaaacggtttatcatgttcaatcgcggcaatatcccaaatccgttcagttccagcggacaatcgtccccgcagggtcactcgcaccccaaccaagcacccccacggtatgatatcgaccgctccccctcaggctatgcgactcctatccgcgataacgatgtgccgatggctaatatatataattatttaagcagttacggaggccaacctccaccaggaggaagacccgcgccgcagatgcctcctaggatgcagtccggacaaagaggtgggggccagacttggactcttcatcccagcaagagtccgaacgaaaactacacatttggaaacctgtgagtataatctagctgctttgtcttctcggagactgatacacaatagcgttgctgtttcgccgcaggacatcccaccctcacgagatggcaccgacgtcctcctccttatcaatgacctcttcgtcttctctgctcgccctctcgatggtttccctcccggttttatgagcatgtcggatcctcagcgaacatgggccaacattggattgagggatgcgatcaaggtacaattgtacgatccgtttagccaaggcggacaggcctacctgggctccgcggatattgaagtcagcttcgcatctaccaagaagagagttgaagcaccttatgaccaggatgaattggcacaggcggtgatcagggttagtcaacttcgtctcagccacgaatgtatgctaatagaacctagaactttgagaaccaattattctcacctggccagagaattctgatggataagaagagtatcccactcttactgcaggtcaagaccgttcagcgggttgatttgacatcagagaaggccgatctcagttctggacaagtcgaaaccgatccttcagccagaggtattctcacacggcacacccaactcaactttttcaaggatacccagactggtattaacgtgaagccatctaatcgccgcccggcggctaactctatcatccaaccgggcttcaagttccaggatatgggtatcggtggtttagactccgagttcagtacgatcttccgtcgtgcttttgcgtctcgcattttcccccctggtctggttgagaaacttggtattcagcacgttaagggcctgttactttatggacctccaggaacgggtaaaaccctcatcgctcggcaaatcggaaagatgcttaatgcgagagagcccaagattatcaacggtccagaagttctcaacaagtacgtgggtcagtcggaagaaaacatccgaaaattgttcgcggatgccgagaaggagtataaagaaaagggcgacgagagtggtctccatatcatcatcttcgatgagctggatgcagtttgcaagcagcgtggtagcggcgctggcggtggcaccggtgtcggcgacagcgtggtcaaccagctgctttcaaaactcgatggtgtcgaccaactgaacaacatcttgttgattggtatgaccaatcgaatggacatgattgacgaagctttgctgcgtcccggccgtttggaggtgcacatggaaatctcgctcccagatgagcatggccgaagccagattctcaacattcacaccgagaagatgcgaaagaataacgtcatggataaggatgttgacttggccgagcttgctcacttgaccaagaacttttctggtgctgagatcgcaggtttggtcaaatccgcctcgtcctttgctttctcccgccacgtcaaagtcggcactatggctagtatcaacgaggacgtggtagacatgaaggtcaaccgatccgacttcctccactctcttgatgaagtcaagcctgcatttggtgtgtccgaggaagagctgtccagccgcattccatacggcattatccattattctgcgactatcagcgaaatcctgcgggaaggcgagttattcgtcaaacaggttggagtggctgagtcaactccacttttctctgtactgcttcacggtcctcctagcagcggcaaaactgctctagcagcacagattgctattgactccggcttccccttcatcaagttgatcagccccgaagacatggttggtttcagtgagccagcaaagatctcacatatcagccgaatcttcgacagcgcctacaagagtaccacaagtattgttgtcatcgacaacatcgaacgaatcatcgactgggtgccgattggtcctcgcttcagtaacagtgtgctgcaagccatcatggttttcctgaggaagcagccaactcacggacgtcgtctgttggttttggctacgacaactgagcgtgcgttgatgaagcagctggacatctacaactccttcaactcggatattatggttcccaatgttagttcctttggtgaactacggtttgtcatggagaaatcgggtgcatttgatgctcgggagattgcgcaagccctcgagtcagttggtggacttgcggatgacgggcgcttgagtgtcggcatcaagaaggtcctcttgggcattgaaacggccaaacaggattcggacaaggtcggccgctttgttcgtgttatcaaccgcgctattgaggaggaacagagcttccagtaaacactgtttataacgggctttctattactgagtattagaattaaaatagttctgaagtatatatctgtttacaatcctagtttttcttttgttggtatcttcaaagttcatctctaggcaagccaccaggctagaatccgagaacttatcaaacgccaaatgaccccattcagactgacataacgttatctcagaactgtttgataaattctttctttcattttgacgttatgtttatccaatggccgagccttgctagtttgtcatgttgactacttgtaaacaacccacgcaaagaaggttctatttatataaatcaacacgtcaagtgttcgaacttcctatgaatttcagccttgatttggctcgtatcggactgtaagtgacaaccgttttggtgtgtcaggccaagatatatcggccgtcaatgtcaatctcgcagttacacaataacataccatacaatgatcagtggtgccctatgctctagttacagtcctagagggaatcaggcacacttcaacgcctgatattacaggtttacaggcagcaattcctagaccataccgaaaaacacgtaaaaccaataccatttagaggcactgctcgactatacttcaagatacgcaaattcctagccagcatttacacaaagacctaagcaaaagagcaaaagcgcgccaaaccaaacaaagaagcaaaaaaaaaacataagaaatccatccttcatcccaagatcgcaatttttgttcatcaagggggttgccctttcatatcagtcatcaacaagcaaagtgcagcccaatctgagcccaatcaatagccatcatgagcaaacttcttcgaagagcggcggtactcatcaggatgggccttctcggccttagctttcagggcactatttccagccacgtgtgtcagccttctagaaactcactcatcggcgctaatgccgcaggcacggcgctgatcgacaggcacatgccaagctcacccagcggagcggaagcccctgtcgcggagcggagcggaacttgcacgtccatcgcaccacaatgcctggttttaggggtgaatttgcttacctgacacgcttttgcgtccattccaggtcgcgctttgtctctcttgcggttttaaggccttcggagaaatttgctcgtgcgccttttagtcgtcgttgggcgagcgcttgtagctccagcagttcttgctgttttgcgttcagctggccagatctgcaagtgaatttcgctgttagcttcgtgtttgaagatcttgggatatcttcctgggtcttgttttgtgaagcacaatctctaggtggtggtgatcgctgcggggaggaattgcaaatgctgatagtgttgcatggaaactcacgtctgcgcctgtcgtgccagacccttgtccaatggtgttggatcaaatgcatcctgcatgcggtcgcttaggacatccacgacatcgacaccggagtacgatgcaaagctggagtcgtactcgccagcagagctgaaggtgagcccaccagaggaacgactgccggcggtggtgcttgcatcagagaagtctggtggggagctagagaccctggaaatggggtagagagaagctggtgccggtgccttggagggtgcatggtggtatgggtaggcagcaggctggtaatagtgacgctgggtggccatgacgacgattgactgcaacaacagcaagtgttataatggaagaaagaggaagtatgaagctcaagtggacttcaatgagataagaagaagcaagaagatgggaagaatgtggaagaatgtgtaaacaggcctaactaggagtgatggtaaaggaagaagaaagaaggactgtctccccgggtcagacgagggattttataatcctccgcggggagtcttctgtccggcggatgctcccattctatcggatgcgaatgtgatgacaaggattgcgcaagcctcgaaggagccattggaccactcgggacacattgactcgcacccctccctctgtacctccaatccgagctccgcctgcacgtatgtctccgtatctgcccgcctatttgcctcttggaccgccttgaccccgctcagagtggaaaaaagactcaatgtgtctgggcgaggacgccagccttcctgcattagggtttccaccgttgagtggcggcttggtgcaaaataggtctcgatctacgcccctcttcctggtttcaaatttcgggccaaagcgcggactaggactattcagcaattgactagaaagggcgttcgatgaggttgggatgggtggagttggtggaaaggtgagatataaatatgaccttcgccgtcattcctactcccactttttctcgactcttttttctcttgatttctcacaattatccttttcccttcccgctctcatccccgttgaattgattttttcttcagaaattcgggggctgggaagaggacgatgaatgttgattcgttcgaacaaagtcaaagataagacggactacacaggagccggtatgacatatttctccattcaactgtcaaagtctaacatgatagttagttcatcggcttcctatacatatacacatgttgtagttgtataattgtggttgaatacgcgcttccgcgaaaaccaaagagattcacgggatgtctcgcggccttacatcgtcgttgggatcggagcccaagagcccgaaagtaagatcgctgcattcaattcaagtcacacggagaatgttggacatcactgcatgaataacaggaccgtgaggaatattggcattcgaaactgctcccgactcggtgaccctatgcttcttttggaaggttctaacaagaatcatcctagcaatatatgagcaaaaagggaaaaccgtgtgaccaatgcgcaacaagtccaggtccaatgacaagaggaaaaagaaaaatacacaaggtgaacgttgatccttcctccgttttgcccgcctggatgcggctgttatttctgcacccgacgagaaagacccccctctcgcacgaatccaccaatagccattagagccttcgacagcaggcaggacagagggaatcatcgctgcatcgagaagcgctctagacgcccatcaacgtgggaagagcacgcagctgctccccactctatgcatatagtcgatgacttgcttgacaatagctatggggcatgtatgataaagggaagccatccggcaagccccgtccgaaatactatatttcgagagatgctgtgccgcctatgaccgttcatcattggtcccagataattgctgacatcaagacgacgcagtgcctaactaggtgggaaggaaatgggactgcaaggcatacccttccaggtgggtgttctacactgaaactggatcttccttgcgcactctaaatctgcttgttctcttttttcccgcccgttgatgcctcactatgcctaaaagccagcctgcatgccttacagcctgacgattcacgatatgccccgtcgaccgaggaaccctgtgacaccaccgtcctcaatcgatcaaaaccatggcttggtgaatatcgcagggatgccattcgtctctgctgaaaatggccgagcccgatctcttattcggctaggccaacatcgggcagcacggcaattaatgacgcacagtacacacttcggcaatacgcctctttttgtctgatcttgctcttcgtcatagtcttcccaccaacttcgtcctgatcagcccccccttcaactcggactccggacccaaaggtatattcttttgaaccttccaatgttaatactccggataggtacgatgtcaactgattttccttgcgtcggttacacaagcccgctgttttgatccgaatgtgttgaggggaatcccattcgtgcctgtttttattgaccatggcgttcaattaaagtcctttttgcctattagccgggtgtcgacaattcttctactaaatccaatccgaatccaacaagtttattattttttcagcgcacaagtggggggttgcggggattttctacttccttcaccgccacatgcgccatggccaactcactcttacccttttcgggaagtatctatcactctgtgcctaccgagtactccgtacatatatgtactgtactatcatcgggatgatggcaaaaataatgttcaaaggattggaatctaggcgcatccctcggtgtttacttcgttgaatgtatgctaaatcaaacaaaacaaggattgtcattttctcgaaaacactaggctctagaatagctcatattttcagggatataggagcatctcacattgaatcttctaagagtatacatactagattcaggtacaaggcctctcagcgggtttaaatacaaccactatatcgacgtgatggaaagttcataaagatttttagtgatgtttcctccgtagtcctcaacgatatagcgcgtaatcagaatttccagttgtagaagtgctcaataagttgaaaatccacaattaaccttggaaatggccaattttctgctggcaataaaagccaagagaactaaagcccccagtcgttatgcactgcgagacctaatggccaccacagcgtctgtattggggtgatatattcgtacattcccagtgattgtctttgtttacagttctcgttattaccacactcgagtgtcattagtagtagcagtagcatttctgacaattttcaagattgttggccagctgtacatggctatgtatacaatctaagtcttgctactactagtaccttctcgcaagtcgagtgcttcgcttcagtattggttcgatgctgtagagcttaaaattatcatttgatacttcagaaaacgcttaagttcggagtggagacataatctaaggatatgtgttgagacccttcccgccttagattgataggactccctaccttgtttggtcttattcttctctttatctcagccagccaacacaatacaacccatcgtttcctttcccatcaatgtttgggtagatctattgtggacgtgggcattcaatcacgtcattgttccattgtaagataactagttgcaccagatgtggctttgataatatttggggaattgttgctccccctccctgaatttctagtaccgccttcctgatttggttgagtacttgctcgacacttgcttctgcctaccgctgtcctcaccgcctcttaatttgtacaccgcctttgtatggaaatgcatatgatagtagcaacaggcttggacagcaggtatctatagcatgtattgaagagggaaataaacgatgggcagcctggctatgcaggcaagatgaaaacgacataacaccaccaaccatccgggaggggtcagctagcaagcatagggaccacatagaccacaccatagtatacaatctcctagtacacaaacatcttgcgattctttctcatttctggggtgatgtttcgtctagaatatctgctccccgaaactctacttgacatccaggctctcgttttctctgcctaaaggacaaggccactaaactaggcattccgactttccccactgcaatatgtaaacttttaataaaagtaagtcacttctatcatagcttgtatcaactgcttgatccataaagggctgaatcacacaggacgcaggtagaatatacgatttttcaaccaaaattcatgtctttttacaatgaaaccagaagtaggcagaatatatggcataatcacgagtgggacccgatcaggaaggcggtactgaaaattcaggcagcgtagcaacaattccctagttagttaactagttatatttgacagcaagaagtggggagagtgacaatcaacttgaggaaagaaagggggtatgtctacatggagatttcgagtttgttcaagcctttatgactctggctccccaacacgtgcgagagccttcagacacgaaagatgcttatcctgatgcagggcatcgccaccattcttgtaagccctgaggacctctgaatccctttgtttgattatgatgaccatgtactggattccatcagtggcaagctcttccagggctttctcattggcctccttggcttcttcctgaatctcgtggagtcgcttcagccagaacatgtatctccatggcgaaaatccagcaggtgatcgctgtccgagctccgattcaaggaacttctcgccacccttgctgatgtcgctggggcattcgttccaacacacgtctgatagtaagaggaggttgtggtttccatttttcagccaagcaacagcagctggtaatagttgaaagacctcaagctgatagataccacggttgaggtcctcctcgtctgactcgctctcaccccggagtgttttagagctttcaaaaagatcacggaagatcagaagtgcaacttggcacagcctatccttagcgacacgagtggatgcgagtttggctaggaatgttgcaaagttgagacggtgtgttcccgacatagaaccaccgttattgatccagaactcggtcatatcgctagccaaaaaggggagatcattccaaagtgtcccgtcgacggttcttgcgatatcaatcccacaggttcctcgtgaaggtctagtcaacggccccattccttgaatgcggacgatatcgaggactataccctcatgttcaggtgattcggaggagatatttcggccaagctcgtagtacatataccacagggaatgaatatggccttcaagagtatctaaaccatcaccaatatcgcagtatcggctggtaacgacccaggtccggtcatagaaggctacatctcgaatttctttgaaatcaccccgagcgatagactggcgggtactttcctggtctctacgagcatagtcgttcgttatgataataggagcacctctaggcagagagctcagcagagaatcacggaggtgttgcattttgggaacctgacaatgctgattgatgattcaactagaattcaggtaagagaaaaaagacagtaggaaaacgaaaggattgatatggtggagccccgcgggggcttaatgagaacccccggtactaggcagcaacgtacagctcaccaatatctgaattgttggacttcggtatgcgctggcaggatgtactgttttcttcgctggttgtcgatcaaccagcaagacagaagtgcatttcctaatagactgggtggccctaggttgtggccctggacctatttcgacctgggatgatgccccagccctatttctaggcgagggtactcgggatccggttcggcccggcccagtggatacacacggtggtctccactccaaggtatcttgtgggagccctggaggtcttacaacctcagcaaaggttccggaattatttttattaggagcaagggtgactagataagagggcagagagcattcgatgcctttggattgctttctcaataaaacgcgccggctcaatgaactctactttgcctgactcgatcgaaaagccaccactgagcgtggatctttggtgaaacacattctggcagatataaaaaccagtcatcttcctcgtaagggcgaaggcaggttgtacaccggacagattcaaaatagtcagggtagaacccgctatattcccagtcaagtatcccagaaatcacatacttgttgtcggtcaatttaaccgtgatattgtccggtgtgatgtctccgtgtgtgaacacgatgcgagggcccgaattattagtaaacgatggtgctaattgacggagaaactcgatgaacacgttgccgcctggatgcgggcccaagaataagaatgtttcaaaatcctcaaggctgaagataggtgtctcgctcactcggacatgcctcctgagatctctgcagccttcacctgcaactcctcctaaaggagtgccttcttcaaaaggaagagttctcaaatctgtaagcattgtgttgagttggttgctaatagaggttttttgatcagagtcgagtgtatgccagacttccctaagcgttgtagatcccatatgactcatgaatatcaaagaaatcccgctcatacgtaccaagccaagaggctttggcactggaatattcggcttatgacggtcaagatattgtaaagcggtatattgagtattgtgttccatatagcgaacggctttgataacgatttccgaagagcatttgaacactcctttgtggtgaaagaagggagctttgtaaataatctcactgctctttaggacttcaaacagcctttgagagagtggcaatccctcggcagtttgtgatattggttcgagtaattttgcaaccgcatccgaaagaggaaacacaatttcaaccgggtctgatgggcaaagggattctcggatgtcttgctcaacgtatctgggtttctctggcagatgatgatgtcagctatgcgaataaggagagtctaaattgcggtattgtggtgcttactggggctttcgattgtggttctcattctcaaaagacgttccaaatattgagtggggaattgatcggccaagtcgacctctggatctttcgtgagtgcggcttgtagctttttcaatgtacgggcattgaacctcacggcttcgctgacagattgagtttcgctggcaggccgagcttcgttggcaggttgagcgccctctaagtcgaacgcccctttttcaaccatcttccgagacggcaatctgagacctcacgataaaaaaatagaaataatgatctcggatgcctaaatggaagggaggataagtaggtaaaagaaaatggtgactctctagtctgctttgcatgttgtaccttggctacaccgccattcctcccatccctatagcgagctatgcaggccgaggccgagcatctcagtcgacactatcgcaatcgttctcagtagggcaaatgtcacaatacgtactatgaggaggactgcctctacccttcaacgggcctcgaggttggatattactcttgtatgatgcaagggatggtgaagttatggatagctaacatgcattagatgattccctctcttttaccaagctccgagctggccatcgtttctcaaccgctgcaatcacaagagtcaaaacaagctcaaacgcaaagaacatagccgcaatctgatatccgactttgaaatgtggcgcctggctggtattataagccaatagaggaacccaggcattgaatgtgaaggcgactgcctccatcaccccaataacaacaatacgatgctcagccgagaaaccacatgtctcactaacccaagacgtgaaaataattcctgcacccgtctcaacataagtcaacagccaaccagccatcattgctgcggtgttatgcaccggccaaatagagagaattatagtcccgaccaatgctggtagacaagcaaacacaatgacaagccaacgtatctgcaaataatcgcttgtttaggcatagaggagcgtaaaaatgatttgcagtccatacccagcagatgggatgacgttgacttgttcaactgtgtatctgccggttgacttgagccacacgttgaaatacgagtagatgcgcaagccacaaacgtgagcaatgaagactgtaggaatcaaccacaccggccatgagcgaatgacatctaggaatgttctccatgtgagtttcgaagctggtgcacggccaacggcctccattctctgcgcggcatattttgtatcttacttgctaagccatcgggttttcgagtcattcggagaatcaggaatagcccgaaagccgtatagagcaatgggtactctaagaataccataagaaataaacaaccgctgccaagcagagagacctgcgcggccattcatatccgaatacagcgctgcctgaagatatcccgaaaacatgttggaagcactagaggaggcttggaatattgcgctccgttttgccagttcctgtggtgtataccaattccctagaagtgtgatgatgcccggataagcggacgcttcacaaagtccgatcaaaaagcgcagcgcaaagagcgtttcaacattctttgcgcttgcgagtgccatgacgaatattctccatagtagctcaagggctggtaaccaaatagacggcctgatcttggtgaggaccagctgggatgggagttgcccgatgagatatccgatgttccagtatgtcgtgaggtagttcaggtcattgccctttaggtcgagggcttctttcatacctgagacgtaggcattggaagtctgttcatgccaatatcagctttgctttatccgatcgatgggtcacttacattggattgatctaaagatttgataaaatatgcggtgcaggcgtagctcaatagccaccaatccacctgaacgagtttgcgcccacggggagatttgtcccagatgtcccaaatcgatgccttcagacgcgctcgcctagcttgcggtatagacacctccggctcattgcttggtcggtcgagctcctggtccttgacctcatgtcttggtttcaattgatctccggacaacatagtctctgaatttagcagtgagtaatgtaatatgttctacatatcaatctatctcatttcatttcagtaatatttatactacctagcacttttgccaattgttctcggacaggcacatcatagagccctagcggcgcggctccgacaggttttaccgcattgggacgaaattgcacattatataagcttatggcgcaaggcaacatcccatatctgagcattaaatagcacagctactgcaagaattcttagtctttccacgaatcattatggaaatcgaccgggtaactgttatcggcgcaggcccctgcggcctaggagttgcaaagtatgtgtttgcctatcgagacaaagaagaacgtgaataattaatagtatgccaaggtatcttcttgctgaacgaaaattcaagtctatcacaatattcgaacagcgcgaccaacctggcggtgtttggaactacaccggcgatgagggcatcagcacatcggcacttgcccgtcccaacccgagtcaggagcctcaacagcccgtgaaaggaacttttgcttcccctgtatacgacgcacttgaaacaaacatccctaaatcgttgatgcagtttaccgagtatccgttccccgcggccagtgcgctattcccagcccataccgttgtgcgagactatcttcatcggtatgcagaggaattactgccatacatacgtctgaactctttgattttggatgtcacactgtcaaaaaagcatccaaggcccgagtggactgtaacctggcgtgatctgcaaactaatgagattttggtcgagcaattcgatgcagtggttgtcgccaatggtcaccataatgacccatatatccccaaaatcacaggcttagatgagtggagtcaaacctatccaggctccatcatccattcatcttcttataggcgtcccgaatcatttgcaaacaaggtatgtacccaacccgccctctaaaacaaacaattactgactaaaaatagaaagtgattgtcgtcggacactctgcctctggtattgacatcgcgaaccaaatcggccgtgtatcaaaacacccgctgctgatttcggaacgcacggcaacaaatctctctccacaacaagccgccgttgcccaaagccttcctgaaatcagtctcctcagtgtcgaagatggccgtgtgcaatttgccaatggccatgaagagcgagatgttgatcacatcgtcttttgcacgggctaccacttctctattccatttttgtcaagtctccagccatctatcgttacagatggcgtgcgtccgcatcatttgtaccagcatgtgttttacagcaaagagcccaccctcgctttaatcgggtttccccagcggattgttccattccccttcagtcaggcgcaaggggcatgggtcgcgcgcgtcctggcaggacgactctcgctgccttccgaggctgaaatggagcggtggattggcgactgggtagtaactcgcggcgagggacgcggcttcaacacccttgcctttccgctcgatgcagactacatcaattcgctgtacgagttgagctcgcatgcagctcggaaggatgggttggagaatgatgggcgtggtaaaaggccgcccttctggggtgaaaaagagaagtggacgcgtgagagattcccgttgatcaaacaggcgtcgcaggtgcttggtagtcgacggggtgagataaaggctttggaagaccttggctttgacttcgagagggattatgttccagatgccgaggcgcgtttgtagactgtcttattgcctcagataaagatggactagctgttgaagctactccaatgaaccgatattagaaggggctagaaagatgtctcaaatgatgtcaagaaagacacaaaaataaccggtgcaaagacatagatcaaacgatataagaatcccgttagactctctagagttaacatagaaggtgcagcttgatcggaatcaggaaacgaaaaatataagtcccattcagagcatatcagatcctacgccacccagaaggttcatccaatgcgtctcgaatgcagtctcacccatattgtcatctgccggactcccaataccaacgcgagtagcaaaatttccactatcaggcaggaaattgaagctatgcatagtgagagattgagaaactcgtctctctgtcactttggacctcagaggccagatgtaaaagcttgcctcgcccatggtttgcctcagcaatacagccaagtcatcctgtattgattgcagtcccaattcagtatccagactcgaattgggcatcacagaagacccagataattgtctgcgtggaattaagggactcttctgctttgttgtaatatccgcgaggcgcctcaaaatccgagaggcttcatgtgcagcatgccaagaggaaggaaatagttcaaacagcgtcacgagaagatcaatctccggaatgtcgtcaaaggctgcccaccgagcagtacagtaaaggaaaattgctgccaatgaaaggaggcgacagagggtaatccaattcatgggtagatgtcggtgttcatgcaggattagactcagctgtatgtactgctgcgcagcagccttgaggctcggcaggttttcttcggttgtgtctccctgtgcaggagtgtacaacagaagaagcaagttttggtagcggacattgagccatgttatggtagtatgaaagggaagctgatcctgttctgataaagtagaacttgataatagacatccctgtgtataccaatcttcgatttggaggcgtaggtcctgcggacgcatagaaggatgtggatcgtaaatggcattgacaatgcgtgtttcgaggcgtcgtagagagatcacatgccggctgacttgtagcgctatcgcgtactgatgtccttcttcggaaccatattcatgtatcataatacttggcagcggtatccgcattatactgtcagggaaggcaaatggaagtccatacgatatgctgatcatgcgagtgaacacatacactgaccaacccagccgacgacgtagctcaagtacccgaggcgagaggctctgattggtaggagtttcgttcatcagtccgactgctagagcatgactggtcagaacgccggtaatggctcgagggtcctggtcgcagggtacgaagaggagatacaagccgaggaggagcaaggtgcccactgattgctcattcacttggcagacacactcgcagagcactcttttgagacacggctgaaaatcccgttcctcgatgctttgcacttctccagcccgctgcaggcttgtgaagccgatggccattatcatgtagagtcgggtgggcacagccgaccgggggagaaggccatcgtctgcttctttattggcgagtgtttcgaaatctcgaagaacaagttcgctgtcaagaaatgggtatgtccgatgaacgtgtcggaaataggcctgcaagcatttgcgacccgctgtaacggaaatgggcccgtcttcctcggctttggaagtatggctttcctcaaaagcactctcactgggctcgatttcactagcatcaagtgatgaagactgcatcggggtacccaaggctatatctcgcccggtctcgatgtcttccaccgatctaccggcggggagtgtttcattaacaagctggctcagccaaacaatgcgtgattgcaattctcgttcgcgcgtctgcggactcgcagagcgctccatcagagaacaaggtagccaagcaacaagacatggtttgcaagatccttcgtctgttctggtgcaccgcttcttttgctggcgacagcggcgacacgccggtaaagggggtttacggccgttggtatctgcgggtctaccccgggatcgtcgtgtctccggttttgaagaattgcgatggactcgaaagcgatggatggagccctccattattgccggatgaaaagggtcaatttcggggagacaccgtgataaccaacggagcacgccattctttcccgcaacgagaaatacccatcggtgccgcaccgcgttgtatattcaagaacatgatttctcgcaatgtattcatattttctttcattttattcttctccaataatttactcccatcatggtatctgaaaccgaggcggtggaaatctaccgcgacgccatcgtctttgacgggttgaacatcgccaactggtcgcgcgagatttttgaagcatggcaacagggcggcatcaccggagtttcatgcacatgcggtaccttggaagggttccgcggcgccattgccaacgtggtataatggaagaaatggttcgaggaacattccgacctcatcgtacaggcgcactcggtcagtgacatccgcgaagcaaagcgcaacggcaaaaaccgccgttctattgtcctggcaaaacacagccggcatcgaagatcaactagattacctacgtgtcttccgcgacttgggtgtgcgcaagatgcaactcacctacaacacacagaattactctggagcaggatataccgagattcgagactcgggtttgactagatttggtcgacaagttgttgatgaaatgggtcggttgggcattgtggttgatttatcccatgttggtccggtgactagcgaagatgttatcgagtatgcgtctaagcccccttgcttcggccatgtgttgccaggtggacttcacgagcatccgcgtaacaagtcaaattatcttttgcggcttattgggaagaagggtggatttgttggaatcagtcaatttggaccgcatatggccaggggcaatgaatcgactatcgacgattatgttactgctgtggactttgttatcgatttgattggcgaggatctggtcggcgttggttcagatgctagtgagggacatgcccgacaagtgattttgtggcctggtgtaatctagataaaggttatgcgcgtcgcctcactccctggggaagccagacggctgtgaagcctctgggcccgttgaaggaacgcccagaactggccaaggctatggctcgggcaggctggtcgaaatcaaagatgcagaaggtgttaggggagaactggctggattatttggaacgcatcattggagagtgatgctacatatatttagtttaggtaaaggcaccggtttcagtcttcgatactcatttatcccgctacatcgatcctcaatgatgtatattcccaatggaaaagagtttgaatgctttaaagtattcctaaggtgtgataatgggcacgatagattggccaaaagatatgtagaacacacaaaggaatagaataacaaagatctaaaagtgtcactgttttataaacgcattgaaacacatcaagtatgaacaccccaacctcctccaccagggctattgatttgcataatctccccggcctgcagcgcgagtgcggctttcccagtaagagaaagtctctccaaagccgtcttttcttcgttccacttgaatgcatagttctttcccacagaaccaggttgaccaccgttcataccatacggagaaaacactcgccgatcactgagaatgctgaatttgagcggaattctagcctcgatttcacggaccgcaccattccctcctcgatactcgccatctccgccagtattggggttgatcgcatgtttgcgaataatgacaggggttcgcttctcaacaacctctgcatctgtaatcttcgtatttgtcgagtgcgcttggatggcatgttctccgtgccagccaggtccagcaccacaaccgcctcctacggtttcgccataattccaccctggttcaataatcccagtggcaggattcctccctcccatgccccagccgaagctgttcgcacagccggaaaacgccgcacagctctcgaatgctcgcaagattgtgtcaattacacgctggcttgctagcgtactgccgcatatggccacggaggcgctgggtctcagaactgatcctttggggatgcgaatatctataggtgatagacagccatcattgagagggatatctgcatcaagcaggcaccggacgctgtagatcacggctgaatgggtgatggatatagggcagttatagtttccccacatctgaggaccagtccccgtgaaatcaaacactgccccgccagcttcatcgatcgagatagacacttttataacggtgccatcatcaaagtgatcactggcggtcaggggcatggtcctagtctgggaaacactcttaaggtattctctgactgctgtttcggaattcctttgaatagcattcatataacgatccacaaaagggaaagtgaattcggcacacatcttctgcaaaagaagaataccacgctggtttgccgaaatctgcgccttgatgtcggagatattatcgtccaatcgacgacttgggctgcacccagggagatcacccgcagccaagaaggcattgcgcacatccgtttcaaggaaaacaccattatccactattttcatcgagcgaacattgaacccttcttgccacagttccttggagtctggcatcatagatgtgattccttgtccacctatgtccgtatggtgaccacgagccgcaacatagaaagcaacggtggtctcgccgtccacaaagacgggagtgatgatagtcagatctggaagatgggttccaccgcattcagggtgattgctgagaagaacatcgccggccttcaactttccttcccatagacggtgctggtattggattgcatattgcatgcttccgaggtgaatggggatatgcggggcgttagctactaattttccctcccgtgaaaagatggcacacgagaaatccaggcgctcttttatgctggttgaaatagaggtgcgctgcagtgtgtagcccatttgctcggcgattgccatgaaccgatgagaaagaatggaaagctggattgggtcgatagtctcggactgagctacttcggtattggagggggttttagtctccgatttctcgaggaccaggtgatttgggaggaggaaggcatcaaaattagactccacgaatatcgtttgagtcgcatcaatcaacaaggcaggacctcggacctgagagggtcgccggattgaggcaagttcaaatatcggaacgttttgccactctgaatcgaaatatacagactgagttcgatcagcctgcagatagtcatttagagacttgacttgttctaactgcgaatatggtgataattcctcgatagcaacaccacttcggccaacaccacggaccttgatcgaatcgatctgtatttttctgtcgagaacgaatgcaaactctcgcagatgtgtggctataaatgaggctccataatcttcatccttaggtttgggcacgacaatgttggtgtctgtaccggtatatctcaaactcagggattcttcaaagacaacagtggatggatctgcgccctgtgagagaagggcagattcagcttgggatttcaggttgctgatatgagctcgaatgtcgtccagcactttgaaatcgaaggaaccaacaaaagggactgttttttcgacctgcagatcggcttgagaaattccgactgctgatagcagtgaagagtgtttgtggatgaggatccgtgtgataccgagtttgctagcaattgagcaagcatgctgacctccagcccctccaaaactgaccaacgtgtgactgcttggcgcgaatcctcgcacttctgttgcgttacgcattggtcgggtcatggtttcgtttgcgacatcgagaaatccgaatgccacctcctcgggtgtgagcttttgcccagtttgctcgttgatctcgcgagtgagttcatcaaacttttgtttggtaacatccagatcgagatgttggttcgcattcgggccaaagatacccggaaatgaagacaggaccagtcttcccaaaaacaaattggcgtctgtcacagtaagaggacctccttttcggtaacacgcaggaccagggtgtgcccctgcgctctcaggtccaacgacaaagagtccatggcgggcgaacagcatcgaacctccgccggccgcgaccgtcgcgatgttcagcatcggcgttgtgatctttcgaccccccaccgtcgtctccgtcagataatcgtattttccatcataccgacaaacatctgtgctggttcctcccatatcaaacccaagaacaggagtcccttcggcagcatcaaagcaagttcgagcaatgcccacaacgcccccagctggtccgctgagaagagcttcatttccgcggaacttgtccgcttgtctcaagcctccgtcagatcccataaattccactcgctgaggaagtacactaaagccggtctggaacgccttgatataatcccgcacgattgggtacaagtatgcctctgatgaagccgaactgctgcgttgcaagaatttgatgacagggctgacttcggaagctttgatcacagtttcaaagcccatatcttgcgcgatgtcggctacctggtcctcatggccagaatacagataggaatgcataaaagagatgaccaaagatgtatagcctgcagactgcagcccgctcagcacttctcgaacctcaacgggatcaagtgctttcaacacccttatcacctccccactgggtgttcggaccagtgcaggatctgtgagtttggccgctttatctgaaggaaatggattaagatcatagtcctcgatagtgatgcgttcgtcaatttcgaccgaagttgaatgcagcgcaggaggctttctgacgttcaaggcaaatagcttcggtcgagtttgatcatcgatgacacagacatctttgaagcctttggtggtgacaaatgcgaaatctcggcctttgccttcaagcaacgcattggtcgctatggttgtcccaatacggcaggaggctattcgggacccgtctagcttttcacccactggtatttggcggttttcgataatctctagtgcccttcgaatcgcctctgttggggcgtcacggtagttctgcggatcttccgacagcaatttgaacacaaggtcatcacgaccggggatttgaaccaggacatcgcagaacgtgccgccgcgatcttggccgtttagtatggtttctttaatcgggagcggtatagagtcacgtaccgatggagatgtttatgcctggggcagtcgtcatggtggctgactatgtgcgatttgacaaagagctctgtcgcaaacgtcgccaaaatcaattggtctttaacattccgattgaatattgatatcgctggtggtcggcactaaaatcacgcgttatctcgtggttttgaggtgatttccccactcaagtctaggagtggatattattttcggaggttggccgacgtctaagagcaaatctggttcactatgccgcagtgtctaacagtaacgccatctccaatttgccactgtccactatttacatgtccacggttgaaaaatcagctatgcgaattcatcggagtctctactaggtagtgacaaaatatcttcacagaggttaggtatgcacgagactttcaaccctctagaaagactgttatcaggcgccaatgaaaggaatgtcgggagagcttcagatacgatacaatatatcatagaacatagatatcttcattcagtggtcctatctctttaaagcatcaaccttgctaaaacataccggctccaaaagaaggcttacgaaagatgtttctcaatgagtccgatcacctccgcattcttctctagatgcacgctgtgattggcattttcaataaccttcagctgcgctcctggaatcctcgaagcgatatccttggactgttccggtgggcaaatccaatcgcgctcacccacaataaccaaagctttcgccgtgatcaatggaagttggtccctataatcgaagaatttctcctgcttggaatagaggtcatctttgcgcggtcagctttattctgtttggaggttgagaaaaactcactgtgggactttgcataaaagacggtctcgatgttgtgcttcaacgcgagatccgggtcaaagttctcactatatagcggtgcagccgcgtacatgacaagtcgaaattccagatcgctctcaaattgaccgaatatcttatctttcaggaaattgatggaaagatttggggctctagatgccctttgttccagagtacggatagccgtttcttcatcttgtaaaagttagaaaagacgtcggatgttgcacgaaacttatagtaacactttagtagcacttacggtgatgtgaaggagcagttcctcgaagaatcaaatgggaaacctgagacggatatgtgattgcatactgctgggctagaaatcccccaaaactgccaccacatatgatacagggttgattaggtccaagaaaatggcgccttaaaccttcaatatcttcaacgacttgatgaaatgtgaaaggctctgttcgtgaactttgaccatgtcctcggaagtcgaaagaaagtactcgatacgaggacgaaagggatgagtatgctttgtaatctgacttatggtcgcctgttacattttatcagtgaccttagaacgtttgattcataggagtagactagaggctaaccaaaacctcgcccaccgtgtagagtgattatcaacggtgcatctgcaggtccgattaatcggtatgctaactgggcgccattgatagagacgtattcaaccattgtgtgttatagcaaatgtaagaatggaggtagtgaaatgagataggaatgatcaaactgaaaatcaatcatagataatagataatagtcgaaataggaaattgagccgaagccggggagaagtccaacgccaagattgccaagcttatctcgtggtgtcggccccgctccgagaaatatttctgtaagaggaagatttgagcggatcggccattctatctcatctttggcacggagtccacgcaacaattagtttaaatgtcgtgataaggttgtatatgctttttttgttgcagttgttctagaatatacaaagtactagtacattaaaactcctctctcccttattataaatgatcttctcgtcacaaaaggaggatctgaaatcctttttgactcgtcggacgtttgtctcacaaatccacaatgactaaaccagtcgaagagatcggggttcaaaagccaatttcaactcctaaagaattggacagcgaccactcagaattacaacaagaccgccatagccaaacggattcatgtcagaatcagtctgaaccccccaaaggttggttccactggcatgagcccggcacttcaaaggccgacaaaaaactcattttcaaactcgactggttccttctgagctacagctgtctgtgctttttcatcaagcagttagatggaaacaatatatccaatgcctatgtctccggcatgcaagaggagcttgggtttggaccaggaaacgaactcagctggatgaacacctattttaacattggcgcgattgtcggagggccaatctcaaacatggccttgaccatgatccgaccgcgatactggctgcctggatgtctgcttacctggtcgctcttcgtactgttcttgtacaaatgcaacaatgcatccgcgttctacggtcttcggttctgtattgggttcttcgagtccgccgcctggcctggaatccagtacgtccttggatgttggtatcgccgatctgaactcgcgcgccgaagtggtctcttcgtcgtgtccggtgtcctgggacagatgttctcgggctacctgcaagcagcactgttcaaagacatggatgggaaagctggattgtcggcgtggagatggcttttcatcttcgatttcatcctcgccatcccggtggttatctacggctttatattctaccccgatacgcctcacaacacgacggccttctatctctcggaatgggagaggaatcgcgctcgccagagaatcgacgaagaaggccgaactcccgttggcaaattggaccgctctgtcttcaagcgcatcttcttgtcatggcaattatatgctttttccgtcggatacgcattgtggtctctcacatgtggttcatacgtgatgcagttctttggcctttggcttaaatcgctaaagacatacaccgtccctgagattaacagcatccctacttccatgggagccatcaactttttcttcatgattggtacgggatatgtcgccgataaaattggccggcgaggacccgtctgtttcgcagtcgggtgtcttctgacattctgttttgctgttttcacggcttggccttcatcaaatgggttgaaaatcgccgctttcattctttccggctgctacggatgttatacgcctctacttgctggttgggtcaatgcgtcatgcggtggagatcaacaactgcgagcatttgtcttggcgtttatggtcagtcttggatcggctgttgttattccattccagcagttgcagttccctagtggacaggcgccaaaattcaccaagacacacggctgggttagtgggctgtgttttgttgtggcattgagtctatggactggatttggaatcgagattgtcgaacggattatgacacgtgggaagcgcaaggagagcctacctaaggaggaagatgtatgatgctgttgagcatatggaatgttcatattgtgattcgtgagagatattttgttggttcagtaatatatatacatcctggactatttcaaaatctttatgactgacccgccccattgttgacttataagtccttttctttcaccttgccaagtttagaatcatcaaaaacccagcattaagtaatcctctatacaaaactatgttttatatagagtggtttgttactcttgcggtagaactatctgccctattacagccatcttatttagacctaacaagactacttcccatgatgggatgcagcgtttaaggcgatcccaatcgtacgttatgccattttcgtagctattgtctgcccactggtcgtatggacccgccgttattatgccacgtttctcgtctcaagggtggggctagaaccgaactagtgttgtcagagcctatataatgtctcagatgagagacccttctttcataaaacagctttttgatatatgacatctatgtgagtagaagtggctcattacgttataataagtcgtaaatagccaatttttgctggcaatgaaagtctatggactgcgatattcagatgaatccgagcacatatctatctgccgctcgagttcataattcaacccgtttctctagtgcctgactgccttcgatgaactaagtatagtgccgttctctttaggctcgagacgtcagtggaagtaggagaactcaggaagtacccgggatcggcatggtcggagaaggggccacatttctcaccacacataatggaagtagcggaggggctggattgcttgttcaccataaggcgatcggaagtgggttaaaatagctataaatagccagcgaaggaagagaaaaagctccgcaaagcttctatgccagtcgatgtacttcttaagaacgtacgacacggcattcacgagtggatccaaggaacccaagggacaaggccaaaactaaccaaacggacgtccggacaccaaccactgggattaacctcggcccaaagggccttaaatcgctgctatggctggcgttatcgggcgggcttgatagtagtggcgatagcggaggtagaattatatttcttacacgacacatcttgagatgtcgttgtggaatataatcttttcatctgctcgtgcaaaattgaagtatagaaaccacttcgggggagacacaaacgcaataggaccgaaatccctagtagtcgctataaaatgcgatgctgagccctgggcatcatcatgcgcgtcaggtaaataatagaagcaagtggcaattacgatttcaacttcagaaacgacctatagatataaataaccccgagtagcccaattaccgggcagtttgctccatccaccaaccaaacgccaaagcagaaaggatagtaaaacgcaggcgaaaagacagagaaaacagagacagaagtaaagtgaacagagttggattattaacaaatacagatccagaaaatagataggtgccatacgctcataatctggtatcacaagaacgtaaagaaaaggcaaaaaggaaatcataaaacagaagggattttacttgcttggtaaaccaaaagccaagcaagagttagagtactgacgccatgatgcacaggaggcaatctgtacctgtgcaaatgcaaatgtcataatgggacttccaaaattgaggagaatcagccccaaaatgtaaaagagcacgctccacacgtgtctagcggacttccaatggctcccatgtacaatggaccaaatccgaaaacacatttccgtccaaaatgaatcaccaaaaagtcactccgtggtccatcgcaaggacgtcaaatgctagaaccggaaagggaactggatggctagatgggcatatatataaaaaaaaagaataataaaacaaagcaggcttttaaaaagaaagaaggggggtgaagagggcaggtaaagacccggggaaagtccctagcggcgagtggcgatggcttgttgttgttctgggctaagacggtctcgcagaagcatcagtgggcgaccgggctcgagaagacccatcatcatcttgcctaattcgttgtgtttgatgggcttggtcacgtagtcattgaaacctgcgcgggcagcgttttcaatttgatctgtcattgcgtttgccgagagagccatgattggaatctgtggataatggttcttttgctcccattcacggatctctctacaggtatcgtagccattcttgataggcatctgaatatcgcactaccattcgatgcggttagttttgccggagggaaagggtataaagtcaggctcacgatgataagagaatagtatcccggctctttagaaagcaccatgttagtgcactccagtccattggatgcagtctccgacatcagcttgatcttgtccaaatacttcagcataacctatatatgagttagcaaccaattcaacgaggttctcatgaatcaacttacgtcgcgattggtttcgtcgtcttcgaccagcaggattcgataacccttgttgcctaaaacttctttgaccatcttagaaacggtcttgaagttgttattgatctcgcgcgccatgtcttggttgcgatccttgctcagctcacgcttgctcttgggatcaaagatcgttgagaaagcagaaggtttgataggcttcggcacaatgaaaacctgctttcctgaagctgctagctccttgacctgtgaactaatttgacgcttttggtaaaggtctgaaatgatgacgatgacgggcgcgggatttaagcccgggtctgacatgttttgaataacctccaagatatcatcagttgacagattcaagacaagatgtgtacaaggatgggcatcggaagtggactgcatcacatctttccattcgtcaacatcatgtaatgccgtgacctcgaacggaatctcatgagggacaatctgctcgatgtgctgctttatggcatgccgggagtttttgagcggacacagaattacgatcgagaaaggtccgtggacaggcgcagataccgggcctactggtgtatctggagaggcagattcaggtgacactacgctgactggttcatcgggctttgtaacggcaggttgggtccttgagctcgagactgcgtctgccagattcgtcaaatctgttgtctgctctaatggagaagacaggggtgcagggccaatatctggagtcgggagggcagaggatgtaactgataacgaggcagaaagtgtagtatcagagcttttgctggatgagtcggagtttcgggcggctagaggaggtgcttgtggataagaggtcgttctagactttgccggtcttcttgaagcgcctgaaccctggcgcatcaatttgggctgctcagagggggaaggtggcggaggcgcatcgaccttgacgttaaaagagaactttgctccctggccctctttgctgctgggagtgagctttccgccatgcatttcgacgagttgcttcgacaggaaaagcccgaggccgctaccagcatgttgctgtgtcccattttctccaagctgactgaatcgttgcataagtcgttccgcatcttgagagctgaacccctttccggtgtccacgacctcaaagttcatgtatgcctgggtgtcattgggattcgcagctggatcccgatacatgtcacagcagatgtgaatttcaccatgcgcagtgaatttgactgcatttccgagaagattgatcaggacttgacgaattcggaaccgatctccaatcaccattgatggcaagtctttgcctatgagatagttgatctcgagacccttatcgaccgctcgggaggcgatagtgtcgattacatcctcgatcattgatcggatatggaaccaagatttgaccattgtcatcttgccagcttcgacacgggaaacatcaaggatgttgtcaactaactcacgaaggttagtggagctgttttgaatggtatcaagcattcgcctctggtcactgtcaagctgcgtatcgagtatgaacggaattgtaccaagaatgccattcagcggggttcggatttcgtgggacatgttgctgaaaaactttgtcttggactccatttggtgattcaactgttgcatggccttgttgagttctctttcgaggtttttgcggtcgttgatgtcggtacatgttccgtaccaggaggcttcctcgctcccgaaactgctagtcttcacgcgtactacgcgaaccagatgccacctgaaatcaccacctcgagaacgaaggcggatctcggtagaatagaagactcggccattctcatcttgctgcaaagaagcaatgccgcgcctgacaagctcgtcaagagctgttccgaccatgaactcataaggcccgccatcacttcgttccgcgttctgagatgttttgttgagcgacagttcaccacacttttcgagatcgtcaggatgaacatgtttagcgaagccgaggtcatgcgcttcctcgagcggttggccggtgtacagattccactgctcgttgacaaatatcaatccgcggttctccgttgcctcaaacacaatctgtgggatcgaattggaaaatgcacgatactttgcatcaatcgcaaacttttccctctcttgagttgcctcaagctcagcaatatgctgctcatgaatgtcgagaaaagacccaatccagtaaagtacctctcctgttgacgatagcagcggattggcccggaatatgaaccagcgatatgctgattcatcgttgaaccttcggaccctcactctttcagtgaactgtgcccccgtgcgcagagcattggcccatttggtatgaacatgctcactctcgctactatgaatattttgccaaggatctctaaatttttgctcctggtgctgacttcgtctgtaagcatcaaacttggaatttgtccaaatcacttcgccactctcgggttttgccaggaataaatgcaaagggatcgaattaagcatcagctgtgctatcgtgtcagagaacgggcgcgggagctcccgttgtagttgggcgtacaacgagttcgtagaggcatgacgtgatgattgctgagtaggtgaaagaacattgggcggtctgatctcttgcagtggtgatgcgacgtagaacgattggtcttgtaggttggtctcatcgctggggattgatttccaggccactttttcgggagaaattgttgtccttgagtcgatattggtggtcttagatctgaaaagccgtggtctactctgcaatgcactgtcacggacacttttgttttgcgggacattgaagtagctgtcagcaccttctccgccctgtcgtgaagccactcctggggacggatttgcggacccgaatccaatattgccaagatcaaatcccggtgtcccaatggcagaaatagtaggactgaacttaacagacgaacgatcactagggctattggtacttgcggacgcggacattgggttgttgttgtcgccaacggagtagctgacgtgaccgcttagtcccgcaacaagctcaagctcactgcttgcatcggagaaagtgccgccgaggcctaaaagttgaccatagcgaggtgtttccatcttggatgagagttgtttttcaagctggctatatcgctgagccaagcagaaagaatttgtcaaatgcggcatcagaagcgagagtgattgtctgaggttaggaggatatggaacgattgtgcacaacattgacacaatggcaacgggaaatctcaccgtcgatgaggactcccggtgagagtgaccaccatgtaatagaggaatatggataacggtcttcgactgatcgatgccaatagcctcaagtggaagattattagagtagtcgtgcgaaggcggatgcttggagaaagctccttcatcgacggcatggcttgtgaagaacggattctgctctgcgtgcgtgcggggagcaggcgatggagcaggggactgagaccacggagactgcggaacctgctcatattcatcatattgcttcaagccatgggcaccgaagccttgctgcatcggtacattccccattccacagccaaccggaccatcaacgtcaggagtaacttggaccatctcatttggactgttggcggactcagtccaacgctgcggatattgcgcgctctctgcatactcacgtgttaagatagtgggacgggtacgcccaaataacttgaccacgcctgtacgcttgatgagagggtctagttctacctccaatggtctaggaatggggaacacagcctgccgcatattgccgaggagactattgagtgattcgtctttggcttcggagttctccgtccaatcatccgtggatggcgagtcttgagaagcgatatgtacgtgccttttctcgggcttgacatttatcttcgaaagttgtggtcggctggtagcgtgaggggtgtggccttggcctttatcaaacccagcgaatgagtggcgggataataaagatggtcgagaaggtccaggcattctagcctggtggacggtctcgggtttctgttgcgagacgcttttgcgcgagtggggtgcctcagttgatggtctcttctctatatgacgtgcttgaagttcatgcaacgaggtatccacgttctggttaaatatcgccttttggccccaaggtacgttctccaaatcggtcacatctccagggacagccagcgacacacgctcagccccgtaatgtgtttgcaatatattaatgaggttggtccaccacaattcgagtcccgaatccgcattcaactgaagtgtcaggtcataaagatcgggactggcaaaattcggatcttcctgcgtctggctatgatgagcgggcagaaaggtcggatgcggttccgacgcttttggttctgaaggtagagtttggtaccctggtgtcgaagaatgggatttctccgatggaagcttcagtctgaatggtccacgtcctatcgattcgattcccattttggatggtttggtctgtatgtgtggaaagggataggacggcgtgtatgctggtttgcgatcggagggtgtctctatctggacacctctgattgtccctgcggaacttaccgagcctgcggaggtatgtgagctggtgaatggggcttccgttgaggtattagacaatgcacttgacaaacgtctctttcttggggtatcattcgagggggcggaggcgggctgattctgagatgagactggttgggtttgctgcatctgttgatatacaaggagatcttccatctgctttcgcagttccttgagggtatgtgaactgcgtccttgatcctcctgtcgttcgacttccgatcgtgcgtcctcggtgatgggtgttagaccaacaacctgctccgtagaatcgccgcgcgacaaacgagacgggttgagagacgacttctcaagagcatctaccctatccgcaagttcatccaccaatttttgcgactggtgaccatgtgggggacggtgaccaggcgatctgagaggttgcatagacactgccgatggatgtgtctctgatggcgaagggaatggagaactcctcctactatacacatcctccattctcacgcctccgcgagtggagggaaagggtataagagggtatcaatggtagtgtgcgaggtacgggaccgaacgatgtgagacgtttatggcttgaccgaagtcgcaaatgggagatcgggtattggtgggtggggtggtaaggacgccaaaggaaataaaacagattatgccaagattagaatctgaaggtgagagtcgggtcgatttagaataatagaagaatgaagacgacgaagacgaagacgaataaggttgaggcggtgtatcgaaggggggcgaccgatattgaggtgttcgagcgagaaaggaacaatttaggaaacaggcgtacccgccaggcccattgcttgcatcgatatgggagtggatgggagtggatgaagggaagaaaaagtggactgggggcgtgatgatgcaccggggggggggggggggtnnnnnnnnnnnnnnnnnnnnnnnnnnnnnnnnnnnnnnnnnnnnnnnnnnnnnnnnnnnnnnnnnnnnnnnnnnnnnnnnnnnnnnnnnnnnnnnnnnnnnnnnnnnnnnnngggggggtggagggggggggggggggggggggggactaatgacgtaggaaaaataaaaacttggtggcttttttcttataaacggttatttccttcatatggtttgcagataattatattccataatgtgtcttgcagtgttcgaaagctgaccttttcagttactttgatttcctcattctcatagatattggaagtcgaccctgttcttcagccaaaaaaagccgatatgacgtagccctagttgtacctggattaccgggattgcggtaaacggcagccaagtccaagtctctctcccttagtccttattacctgggaaacttgaaatatttatgaactacttgtattttatgaactatttgcaggctaggcaagctaggcatccgcaggacccaatgggcatatctatggggtatttgggtgtctgccctaatagaatcacattcaaaaagcgactcgtggaacatccaaatcaaaggagaagctcttgcggtctagaccagagaattcaaaccccttatcccccttgatcagcctctgatttatggggaatggggtatcatacatagaggtcggatgcattgtcacgccttgttgcagatgcctaaccctgggaacgagaagatcgacccgccgacgtcaacggggctcctgtggcgccaaatcggctcgatgggggaaggattagtgcatggacggtcaagctccccttttccggaggatattctattcacgaaataactaatctggggtctacaatactttaatttgatatatattgggagtaatattgcagatttggcaattctcagatggtcagctgagattctcctgtcctatttagaataatacacacattccgttcttcagggctggctcccgtatctgcagtctagactctctaactactatatgcagttaccccgtgcggcgctataactagccggtttcatatatgttctagttaactataaatcctgaaatctctgttcttccaccgtggtagaattttacagtagctattattaggccaaacccatttgaagttgagatttagtgaaatgtacttcccgacagtcgagtaatgtccagtgtgacctaagttcaagtgcatgcgagtctccaggactacaatcagtgcttatgaaaatataacaacccatataaaaagccacaacgccatgcaatcatatccttatttaccagagagttccgggaattccgactccaagtccaagtccacggactgtacaggctctcggttatcgctgccgacatcggaggactcatccaaaccactccgaggattcaactccctttgataaatcggctgttcgatatccttcaaacccgaccccgtggggtctctccgaatgaggaagccctgcacgcgcgcatcatttgaattcatctgtttgacggtgctgtctctacggtcccgtaggacgcgcgccgacttctcgttaacctcacgtagtcgatcagtgtagccagaattcatctggctgatccaggatgcttgaagggcgcccgcaaacagcaccaagaggattacaagccgagagaaggtgcgctggtcgacaacatgctgctgcggcccttggtggcggttatgccagtcctcccaatcttcccatgtggcattcgcgtagatattcgggccatgggagttgcggtccattgtagtatccagtcccgcgtggatccagccagtgccatttcgatcataggccgctcgtttgatcggatcagaaaggagatcatgtgcatcaaccacaattcggtagcgctgcaatcggctttcagcggttaattgattgaagagaggatggtcatggagaggtcggtcggggtggtagatcttaacgaggtcatagtaatttcttttcgaatacttcccggtgcggggtaaattcaagacatcatagggggtgaaagatggattgctcggccatgagtagttctggtgtgggaactctgttgcggtggcatagttcctgcttttgtatggtgcctgcagtctatagcttggagagattctggtcttgaaacgaggaagcggtaagaccgtagtcgagttcaaaagtcgcaggctttcgccaagaaaaggattgatcgtcttgaacattttcacatggtgtcactttaatgttcacgtcgaaatctccgttgcgctgatgtcgtaagttatcgtgagggtcaagtggagtggcggcttcggggctggtcacgtgtatgtagtttttggagcttaaccaaagatctccaactttttgatctacgcttgtctttttctacagtcacattgcaacagcaacaatggccgagtccaacgacgaccgcgtcgaacgctgccggcgctccacgaactcaccctcggatcagacccatgaacgccggcgacgagatgcgccccgagacgactattcgcgttcaagacgacgtggtgaagaccgccggaactctcgtcaggacagccctcgacggagatcatcccgtagtccatctgaaaggaccagcgtccgaagtgatcgtgctcgtgatcggcctcgtcgcgagcgcagagagcgatcaacaagctcagctggcgaagaccgccgcagacacagacaccgcagccatcgataccgtgacacccgccacgaagacgaaggacgagtgtctcgaaggcatcgagatgcgcgatcacgctctcgctcaccgcgaaaatcacgcagcccctcaccgcgagcattggaacgacgcggccccctcccctcacagtccgacgcattcaccgacgtggcaaacccttcagatgcaccagcgccagaaaaacaaaagccaaacttcaacgctactgggaggctcgcagccgaaagcaatacaattgtccagggtggtacgaaaatagtcttgaaataccatgagcctccagaggcgcgcaagccgcccgccaaggaagcctggcgcatgtatgtgttcaaaggacaagacttgctagaaacggttgaattgagtgaacgcagttgctggctggtcggtcgcgagcgactggtggtagacttcccactcgaccatcccagctgctcgaagcagcatgcggtgctacaattccgatttgttgaaaagcgcaatgaatacggtgatcgcatcggcaaggtcaagccttatcttattgatcttgagagttcgaatggatcgagcgttaatggagagaccatccctggtggtcgctacgtggaagtcatggacaaggacgtaattcgcttcggcctgagctcgcgcgaatacgtcctcatgctgcctcccagttgagtggagctttcagtttggtttaaagcattaaagcgctacgggtacaacatgttcgatgaacggaatatgacaataatattacaagtcggatcataattgctgcaagcttaacctagtttttgcgggcagacaaggtcaaaatcttaatcaatgcggcacttggcctccttcactacccttccatctggcccatcgcctactttctcagtgcttcttctgccttgctcttgcccttgtctgcatactgggccgcctcgcccttcacctcttctcccttttcctttgcttgcttagccccgccgctaacagcatccttaagcttgtgggcggctttctctgtgggcaaattcatgttagcatcagtctctgcacattgaatcaaagtcatatagatcaatgagatcacattgaagacataccacccgtgttgatgcccttgactgctgcatcagaaacagtccggtcggctttcttcaatgtctcctttgtcgcatcaacaggtcccttgttgcatggtgccgtagctgagatggagcgaatggcctggaagccaggtgcggtctgtaccgccacccgggttctgaggagaggagcgaatcgtgctgcagacatgtttgtagtgtgatggaagtttccgataacgtgggaaattggaataattgatgaaatctttattgattttcccccggatcagtacaaagtaacttgtttaaataggtttggagctttgaaatgtacttgatttctacttggtcgcccccagctgttagttgggttggagacgtcatgagtatgtagcccagctcttacgtcgattgacagtcagttggtcctccaaacaggttatgtattccgtttgattcggtgactggatttcatacctgcataaatccggttttgagtatgtcatttttgtcattcgttgatcgacgccgttgaatgtgggggacagcgacccacatgtagagaacctcaattactaccggggaacaagaatttgctaaggatcacaacgattgaacaatatatctataactagtgttgcaactctcctattctaaatcacggaaaaatatgttggcgatgctcatcatcgtcacccgggaaacctggacggtgtatccaagagacggatatctgcatgtaggtcatagctagcttttaacagaacgcagactaatatcgaacttgagctcagaatatactccgtgtggctacagtacctgactcgaaaaagcatatatatcacccgtagacaagtatatagatcctgagatactccgaaatatataaccgacccaagctgaacttcttccgcgtcccggaaccaaggtatcctggttatatttcgccacacctagttcaagtctatacgcgataatatataatcgaaaactacggccgaagctcaatgatgggtgttagatgaaacttgaatctatctatatcttgcatttctttcagaggatggcccacttttaccgttaacgttgagcgctcgataaacaggtcttgtcacgcagagtatgcctggtaattatttaggactatgcttccatatgccaggatctctgttgggatattatacgattgtctcaagatccagcgcaaaccaaagttggtcaagactcggagtctcgtgatactgaggagcatagtatagacgcgtctctgtcctcatatatatcacagttgaattaaagaaaaccccattggggtagggtcttacgatatggaccacttaataagagcctttattggcgattagtctcattcaatgagccaagctaacagttgccaacatcaaaagggcaagagagttaacttgctttgtcccacccgacctgatatgcaagtatacaccgtagtgcgaccctgggatccaaactgtcggcaaagcatcaaatcaattacaagccatggaagatatcgaattgatatacagatgcataaatatagatttattcaatatcaagggcataatatgaaagcttactggttcttctggaaacaaatctcgggaatagatatatctataggcatatacaaatcaattcgcactatacgaatatattcaaggtggaaacttgcagataagttgcagatagcagagacacgttagatatagcctatgaatttgatagtcagagagttctatagtatgatagagaatatcaaacacgaactatgagcagatgtaaacaaagttccaaccttggaagtacccaatcgggggaaaaccaactggaaggtttctgtcgatgctcttcacctaaagttttatcttctccctctaccctttccatccactctttctcttgacacaccatcaaaacaacaaagatatttcttttttgccttctttttctgtactctggaccaacttgatccatttctggttgtacttcattacaaagtcactcactacaaatggtgtccgcagccaaccccagtcgcgttgacccctccgagaaagaggaggagaaagcattgaccaacgatgtttcccttaagcaggaaagcgttgcgatcaatgccgagcaagcagacgagcccaccgcgcgtgaagtgaccgagcgtccaactggtcccaaattggctttgattacactggcattgtgtctaggagtattcctagttgctcttggtacatttacactctcagtgcagggcatgactgacgcatattatcttgccctatagacaacagcatcatcgccacagcaatcccaaagatcacaggccaattccacagtcttaatgatgttggatggtatggaagtggttcgttaaagcacgaggcaacctagctcatcggtgtggactgatctttttctctcttttccagcttaccttctcaccacggcgtcactccagctacttttcggaaagttctacacttttttcaatgtcaaatggacctaccttgctgccattggcattttcgagctgggcagtctgatctgcggcgtggccaacagcagtctgacgcttatcatgggccgtgctgttgctggtattggatctgcaggcattttctccggctcgctcatcatggtggctcactcggtggcacttgagaagcgcccgttatacaatggctgtatcggtagcatgttcggcatttcatccgtcgctgggcctctgctcggtgggatattcactgataaagtgacatggcgctggtgcttttacatcaatctccctatcggagctgtcactgttttggtgattgcaatctttttctctgcgcccatccacaatgttaaacaaactacatgggtagagcgcattaagaagtttgacccaatgggtacagctcttttcctccctgccattgtctgcttgttgctagctctgcagtggggtggtagtatctatgcttggaatagctggcgtatcattgtgctgttttgctttttcgctgttctcattctcctgtttgtatttgtccagtacacacagcaagacaatgctacagtaccgccacgcattttcttccgccgcactatttggaccgctgccctgtacagtttcagtctcggcgctgcgttcctctcctctgtctacttcttacctatctggttccaagccgtgaaaaatgctagccctgtcagctcaggtatcatgaatcttcccatgctgatctctgttgtggtcgcctccattttatcaggaatcattatcaccttcgtcggttactacacgccatttatgattgccggtacagttcttctcgctatcggctatggtctcatgagcatgttccacacagacacatccaaagctgtctggatcggctatcagataattgcgggcgccggtgccggtttgggtatgcagcaatctatgatcgctgttcaggttgtccttgatattcctgatatacccactggaacagctatcatcgtgttcgcccagactcttggaggtgctctctttgtttctattggaaacaacgttttcagaaacaagctcattgagtatcttgccaagtacacccccaacttgaacccagcttcgattctcaataccggcgctactggcttgcagagtgtggttagcaaggctgacctacctggagtcctccttgcttacaataacgcaattacccagacattcatggtcggtgcagctgtggcggccgccagcatgatcggcgctttgggtgtggagtggaagagcgtgaagggaaagaatcttgctccgggagccgcataattttctgacaacttcttccagcttttttatgttagcgctttgaatttcttttaacggcatataacatatgtaactcgttttattgagatatcaaatgccaattctccttatcagccagtgataaccctaaactgccacccgtggacctcggggacctgcgcagctaacccaagacgtcctagcgtcctgttaaccccagataagcagcggagaacatcgttgacttcacaatatcttatgattctaggaatactgggggacaatctactccatgaggatgccgaccaagcgacggattttgtcgtgccagccgtgtcggcgcttgaagacacgatgcgaggttcttccaggttcgagacaatgtgctcggtgcatctctctaaggtcggcggccgaatataattcatcaacaactgttggggattaatctgacaccaaataggctcgaatgctctcttccgtccacatctgccatcactagcccagattcagggtctattgggagatcagataggaattccgcccagcctattgcatgccattgcgcagcccggtatttctaattacacttgtatagaccgaggctctaattactaactgaaaggtaccagtcttgatgccatcgaaacctcactctctgagatgaaagaattactgaaatcccaccttctcggcaatgaccggtcaatggcacgacatcctgccaatgagatgcgggaaacgagcagtaatctaaacccgagaaaagatatcaacgatagcaaagccactatgcacgtgccatcagaggcagatatatcggcaaccaccgacatccagccagcaccaatcacagtggtccgccatgttggaagtctaatcaccgagcccgtaacaaccggggaaaacgactccctccgaggaaatatgaccgaaatgggcttggactcggacagcttctccagtgttttccagcacggcttcgagcagatagcatcctggtacccatttccgaatgaaaccctgacggacctcaaacagaaccatcctctgctctttgccatgtgccttctagcaggtatccgcgcaacggctggcctaaatcgcacaaacttgcacataacccttcatacattggtcaagacccacttgggcatgaaaactctagatacgcccattgatctctccaccatacatgctatgcttatcttcagtgcctggagcttcgggcctctcgtgccaggtggtagatatattgatagctggctgatgagcagtacgactatcacccactgcatgctcagctttcctctatccgagcttgtgtctctcgtgggtttgtacgatgaaacaaatcggaacatgtgcaggatgtggattcaggcctcactagtgcacctgaagtacgtactctgcaaatttacaatggtaagcccttctaaaatggcaacagagctgactagggttcaagatatgcaattggcaccggtcggccatcagtggtcccatgcgagcgtcttcaccagtggacggagatcgtcaaataccccggatttgaaacattcgaccacatcattgccgcagagctcaagctctacatccacctgtacgaagcgatttatcacacggtcagttcagtgaccgaggcgtgggacatggtcaacagatggggccgcaaatatctcggaggtgagcaggtcaagttaagcgtgatgcggctatattcatattctgacattcaaaacacagacggcagcaatatactaagatgggcacactcttgcgtatctctcattttatctcgatgggagctagcaaagcagaatcagtccacatctcccgactcgctgatgcgcactgagcgtattaacgagctgaccgaaacggtcatccgtcatgctcagctggtactgagagagattctggtcctctgcacctccgacaccgcgtttgttagaccgacatacgactatctgcttaccgcatatgcgggcgtcactctagcagagtactgctcgagtatatcggacgtgcacgcaacatatacgttgatggaagatgtgcggacgcaggctagaattcccaagagcattgagggggtatttagttgggcaacgaatgtcgtgcagaagaaggcgaaggatcttttggattcgaaagtggcagtaattcccgatgacaccttttattcgtaccccggctcggtcgctgactgggcgccgttccggtttattgactcgatgcctgcttctgaatgggacgggatgaatggctctatgcaacacttttgaactttatagaagcgacttgtctattatttgacggtgaattaaattgaaatacacctttctctgagtaaatcatttcttcaagcagaaatgggctttccatgtgcgagttcaattcggtttcgatgccactagacgtacaagttaggcacatccagtacgggacgatatggatgcggatgagacgtacctttccgcaagagataggctcataaagcgcaggatgagtctcatcaatacacgagggcacaaccttacaaaccgtatccggattgaagcccaggaagaaaggcatcgagtacctagaagtaggctggcgattatagaccctatgcactgtagacttgaacctattattagaaagacgctgcaggaagtcgccaatattaaccacgagcgtgccaggtataggcctcgcatcgagccactcatcactagcagacaagacctgcaaaccgccagacatatcctgccacagaagagtgacacactggatatcggtatgcgagccgatgccgacatcaacattcgcattgttctcctcgagtgtattggctggtgcaggggggtagtgtatgtaaagcccgtctgcgccggggctcgtggtcaccgcatcgaagtagtcttctggcatgtctagagcgagagcgaagatacgggttatcttgcgcgcgagcatgaggcgacgctggtagaattcaattgttgtttcgtggaaccccgggagatggctggttgtatcccatgcgaaggcatcctcgatagacagcgcgtccgggtcagagacggttggatcgttcttaggattgtagcgcagagagaatgactctttgtgatctgcggatgtcctttgtcagtcattggccataactatgacgaagatctctcgggtggggctgatagtgtttaccccttgtttcggttttgttaatttgggtagtccccaacccatgccatccatctgtgttgttttggatcttgcttgatgctagctgtttcttttcgatcggctggtcgaagaaagcttttgcttgggaaagggcattctcaataagctcttcggagatgccgtgatttttgatatagaagaaccccgtgctttcggccgctaccctgaccttggacgcgatggtcttcctcgcttccaaatccttgtcgatactggcgagatctatgataggaatctcatcctcagttggtgggcgcggaggagcagttgacactcggcggaattcggggccgctgagggtcaggagttcgacttgggtgtactcgagcagggttgtcatggttagtgcgacatatggccattaccgactcgacgatgctggtgcatttatccatgcctgttcttgtcttctccccgcactatcccctccagggtccagaggtcgaatccaccgataaccgtcggagaaacagacggcaatcgtcggactatcttggcgcacatgcctgtgtggttggttggaagataagccgagataggctcgcacttgggttacttggcttttgtttctgagatagcatcgccaaggacggagttgcttctctgcttgttcatgggtgttttgtaggttgccagtggacaagtgcggatgactccttatcagtccattggtcactccgaatggctaaataaccctaagaaagcacgatatatcctgcacgtactcctcagttctcatctcctcccccctttcttcaagtttcagagttcgccagtaaggtcagcactcaaagtcaaccatctttactttgacccttttctccactctatctctaccccaccaacccaataacaacctcaataatgtccaaactatcgcgactccatgagctcttactagtgaaaagaacccagcgggatggcatcgagcgccccgttgatatgctggataatgactctatccgaccgacttcagtaaaggatcgaacatggtcccaactcacctatatcatgttctggttctcggcgactgcgaacgtcagcaatctgtacacagcgtccacgggaatggccatgggattgaccatgtgggaagcgatcggatgctcgttcggtggtcagatcctcgccggtgccttgatggctgtgaacggccgtgctggcgccatgtaccgcattccgttccccgttctatgtcgctccagctttgggcattggggagcactgtggccgactttcaatcgggcggtcatgtcaattgtgtggaacggtgtcaataccgttcaaggaggacaatgtttatagtgagtctttttttttcttagtctcgttctttccctggtgagggaagcactgaccgtgtggttgttgactttcgtttctagtgtctttctccatgcgattttcccttctattgaaaacatcccggataagatgggatccaagtcggctttgacttcagcacaaatgatgtgtttcttcatctattggtacagtggctagtatctcaatgcttgatctactgctaactagtctccacaggcttgtcaattgcgcattcttagtggtgcctgtaccaagaatgaaatccctggtctacatcaaagtcgtcgtttacttcggcgcagcatttgctatgctgggatggactgtgtctctcgccggtggttctttgaagacaatcaatgcgccctcggagataaagggcacggaaaaaagctatctcatttttaagttcctcttcttgggactcgcaagttgtggaactttcatctccaatgcgtccgatctccagcgatacgctacaaagcccaacgacgtcctcatcggccagattatcagctttccactgtcgaacttcctagttgccattctaggtaaccttatcgcgtcagctagcaaagctatctttggaaaggtttgtactatcaaaagccttgtttagaactaaggactgatgaaattctctagctcatctggaacccgctgcagttcttggacaaattgatggaaggagagcgatacacctctggcaaccgcacggcctgtgcttttatttctctggcattcgtgtattcgactgtcttctctgccatttttgagaactctatcccgtaagtatcaccttctcccacatttctatgccatatactaacaaccttcagtgcgggtaacgatattgcagccctactaccaaaatacatttcaataaaacgaggattcttcatctgcgccggtaagaaaagaaccaaagactcaaaaaattccattgcctcgacccaaaactaacaaccaaacctactagtcctctcctacgcaatctgcccctggtatctcctcgcatcagcctcaattttcatcacattcctctcctcctaccaaatcttcctctcagcaatcaccggcattctcatctgcgactactacctaatccgccgagggctactcaacattcccgccctatacatctcaagcccaagtccgtaccgatacttccacggattcaacccgcgagcattcttgacctacgttattgccattgcgccaaacttctacgggttccttttccagatgggcgtcaaggcgcctctaggtatcaagcgattctactatatcgcttaccctaccggtctcataatcgcttttgttgtttattacctgtcgtgtctggccttccccccgcctgatatgaagcaggcgtctggctggatggagcctaaggacttcgtggaggatcatgatgcttctggaagtgatgagtctactattgatgctgttgaccctgacttcgcggagaagggggctgttgcggttgctagaccagctggcgaaaagggttcgttctgatgagatatgtctcgctaggacttggggatgtgcatgttgcagcgggaagcatgattaatgatttggtgccatatttacttaatgtctacagtcacagcccatgtgcgcagtttgttcatcttatgatcaactgaaatgtattctctttgctactactgtttaggggacaaaacccgggctcaatttggctataaactatgcacagctaattatgcgtataattctactgatctagcaggtttatgaacgccaagaccataatttatgcaaacacatctcccatctgatgtagtcgaactacaatcttgatacaaagtatcgaagatagtaaatcaacccttccaatgaatctcctctaaattctatcttctaaactccgattgacgtcacgttcttaggtattacccaaacctcgaactaaaagaaactgagaaatgctaaggccacgcaaaaaaaagacagatgcaagattagcaagtataacagacaatgcacgcaacaaaataacaacatggtatgccaacaaaagaataaagacgaataaggataaaaaaagccaaaaccaaagcaaaccaaaatcaaacaccaatactaaaatacataaccattatgagaaccgcacatccaaaccagcatagtcaggttgcacaggggagcttccactacgcgcacgagtcccgtatgcctccagtcgcgaagccggcgcatagatttgtccctcatgctgaatcaaaggacccgacaagttgggatggtacggctgatactggtggggccgcggatgcaacagccgagccgattcatggagtcggagtcgtgcatcttgtacatcaacacggtgctcgccaaaatgcaaaaactgcactggctcgatctcctggttccagcccgagtcaggatgctccagtcgctcttccatggagccgaggtgtccgtgcgatgacgcgggcgggctgagggagatgggatctggctggagagcagcattgcctgccagaggtaattcggtccagctagtcccggtcaacatttgctgttgattttgcatgctcaatggtggatttaggatcatctcggcctgttggaaactcgggggatatcgcacgggttctgtggcccacgattgataagagtaggcggaagagtcacgcgacatcggctcgggaactgagcgctctggggctgaccccacgtgtactttggcattatatgatggcaaagctctgggcataattgcggatggatgagcaatggaagaaagagcccctggggaatttattgagcctggtgttaattgagacgattttctgcggtttggaagagaaacggagttgttctcatcgtatgggggcggcggtggatatggaaagaggaatggcacgcttgcagatagatttcgtggcacctccagatgtggcactgagccacgccgagagggagcctgggatccaggcgtggtatgtaaatctgccccgtgatggtgactgaacttattgaactcaggctcactgtaggttgaccgactcaggggctcggtgatcaaatcttcagacacatcatggtatagcggagatgtaaaggcgtagcccgcttggctgtcgagcgagtcagtggaatgttttatctgcaagtcatcattcaaataggctgaagcctgcgaaatgggaactgatgacgggcgcttcatcgtagactttacttctaacctccgtcgagttgccacattcgcatacgttggcatattctctttgttggatggtggagaggtgattgcaggctgcggaacgtcagcggacgcttgggaattgctagaccgacgcactgcagcaagtgcttgttcagcctccgaagctgacatcaaagtgccccccgtttcggcagatgttgtgcggcttgatgatccctttccttggatggaggacagtctgaccagtggggtatttaacttggtatctacaaagcgacgagggcctttgctgcgcctctttgtttgagtatcttgatttgacctttgctttgagtgtcgattgaccacatgccactccgctaagccggctgtttgtggaggactgaatgagggaggtgtcttgttaggtttctccgtggcttggctcgtttgcgacatggctgtcttaacttccccgtctgtttcataaccttcttcagattcgtatccagcttgcctgaagatatgtggagggaaaagctctaatctgaactggggaggtggtgtagctatatgctcaggcgttcccgctcgagatgatccaagatcactccagttgaaggtagagcggcgcgatgggccttcgtcggatgaatcgcggagggatgatgacgagctgcttgacctgtcgaaaaccgacttttgattccgtgtagagtattgcgaggagcttggagacacattatctatctctttgcttattatcttcatcaatcgtcgcaaggtctctcgtgtttcacgaacgatcagtggatggagattgatggctgctttctttggaaagagctcaagcagtcgtgaagcgtgagtttcgtactctcggtagtcccggacaaggccacagtcttcgtaatgagccattcgtcccatagcggcatcgtaggacgtaatgagaaaacgagtggcaacaatcagccaagtatcgaaaaaaccagggtcattcttgctcatgatgcctttattctcctcgtccttgattcggagctcatcacgacagaacccctgcacgacactatggatcttgactacatcaaccacagatccaccccggtatatggagaaaaatccttcttgactgctctctgtcagggaatctgagagttcggaaacaagcttcacgtccttaggatcgctatcagagtgacgcaaagacgatctgtgctgaaagagatcggcatctgaaatccgttcaatcaaaccatagtgaatgagggttccaagagtagtatcgagatcaggatcttctccggattgggcgctggtctggatctctaagttcacggcggccatagccgctccaccgaggttcagaaggcccactggcacctggtggccaagaaacgagagaagattaatcaagtgcagcgcctgcttttgctgcaaccgaaacaagtcgttcatgatactcaagaaaggttctgcaagcttcttgtctgtcacctgagatctgacatgatacttttcaatcggtttacccgttgcattgagacggtgcccaattgcatgaattgccagaggtagacattcgtagttctcaactatctgggtagccttggccatttgctcgggtgtcggtcgtgtaattccaagatccttgaacagaagcttgcaagcgtcacccacttgcaaccgtgagatcatcaggcaatatggctcgtacagtcgtcgctttttgcgcagcgttttatcgaccgaggtgtatatgatactgcactgtttgctccagggcagaacctctctgaacttactgatatcgtcatcgcgctcgaaggtgacgccgtcgaagatgaggagccaatctttgcgtgtctgcagccagaggcggactgcattcacgtacttttcagtctcgtggtactcggggttcacggtcaccttctgctcaattagcgtggctgcttgtgcaatctcccaaaaacacttgtacgtcgattcacgggacttggcgtcaatccaaaatatgccacctgggtagcagtcacgttgagtaaaaacgtactgccgcgctagatgtgtctttccagagcctggaacgccggagattagtacggccattgtcttttccggacgcgccttggctttgaatagccggctgtgcagcacttcaagttctttcttcataccaaaaaaagtagagttaggatgaaagcctggaggtgtcacgaataggggcgtttctttggcgcagagttggaaaattccactgttccccagatcagatactggggaattccggccttctgtcgcagggccacgcggtagagataatatggattgttctaggatgaagtcagccagggtgtctctaaaagttgtgatgattctcatattgagaagatcggagatctgctagttgaggacatgagatgggagccttcctagtgacaaaaccaataaactaagtccaagaagggagagcacacagtgagttgtctgagaaagagtagagtggatttccaaatgtatctggccccttggctcggtagtgaatgggcaagtcatagagaagtaataggacaaacgtgagcaaactgagctcgaagtaaaaacaaataaaggcaaaggcaaaggcaaaatcaaaggcaaacgtggctcgctagaaatcttcatcgaataggaggctcctcaatctcatagtccctcaacgtaacggatacttccggtgcagggagaaggtatgaagccctaccggtttcgtttaaattaggcatgcttcgatttgccgtgtcatccacttttgctgtaatagtcagtattcaaaaacagacaaatcaaagaggtacactttttgagaaggacttaccgtcatagatctccctagccttggccttcttttcccggatgcgagatttcttctcttccgtccagcgctctgtaatcacagcaggggcctgacgtgagtatcgtagaatggcctctgccacaacttcataaccagccgcattgtcatcatcaaacttgcacatatggctgtggtcagcctcgatacccgcccgctcaacaccctccatgtacggcgcagctgagtgctcgtccacgatcacttcgcgggtaccatgtacatcagtggagcgtgtctcgtggaagaagtagatgtgaaatcggcctatgatatcagcgaaaaggctgttgatgtgctgcagtgtttcgttgttggctcgcagagctttgacaagctgcggagatgtctctatgaacttcttaggaagcacagcattgcaaatgttttgcaacaaaagaccccatttcgcaatatcggatccattgtggggtgtgccgagaaaaaggatgccaaaagtggaaacatagaccgaacgtagatgctctgtcttctcactcgagagactacgggagtaaatcagggcgcgcttcacaatcaacccccccagcgagtggcagatgaagattatcggacggttggagcagtctcgcagctagacaagaaaataatgtcagttctggagactccatatcagtggcaaggaagaaaaaggtggagatgtcaacctacatttcgattagcagcgagactggaagcaagagtctcagcatggctaacgactgaatcacgcgaagttccatctgtaaaggcagtgacgttggcattgtaaccgtaagtaagaattcggggacacagcgaggcaagcacgtctgggagaaggtcggtaggccagaagcaaccggtggtttggctggtccaagtgtcatgaggatggccgttgaggccgtgaacaaagacaatatcgattgtaggatggtcacgcggggtgtagatctgcgtcaagccaaagaccttgatggcctctggatcggcgatacgaggcttagacatggcaatggatgagacaatagcagagtcaaggtgctattgccgtaacatatgaagatgaaaagaaggggaaggagtgaagaatcagttcggactttggcttttataaacgtgatgcgggtgactggggtgagcgtgactgagggtaactggggtgatgtgcctcctctgacccaggtcacccggaccctttcagtcgatccatggggtttcggcatttatggattccgggtgacgggccgtacattattctctaccttttttgtgatgtcttgggtcttgcctattggtagttcaacccggggtttcttgcacagccctgtcagatcgggtaatctgccaggtaccgtgccactcagacctcgaggtacttttattcatagatattgcattttgcatcttgcatcattgctgagtatgccttgtttggggtatgctgccttaaagtgttcagtttaggatctcgttaccctgtttatattgtagcctattaatgactagggtgagaactatagagtatagacgagccctatagatattcaggcagaagtctaaatagaacaaccacggaaataaaagatatcagatccgatatacaagacaaccatcgtgaactttgactgattatgtaggatagtactaacaatgtagaatagtaacaatgtaggatagcactaacagtgtaggacagcgctaataatgcaggacagcgctaatagtgtaggaaagcactaacaacgatgatctacgagacatagtagttccagtgcgccaccgactcatccctccggttcccacgcctctaaaccactggaagtcgagtaacaatgccaatttttttttctgtgaaatgtacagcctattgttcccaggcgcagttgcaaagtataggtagttccgcatggcctcaccagatagcctgacagctcctagttcttcagccttgattatggccgtttcagaaaaccaaggagtgatctgcaatccgttttcatctataatttgaagttcaatcaaggccatgtcgcattgcatcgacccgaaagcaagctcgacagaggctcctccaaggaacccattatagcccagctgatcacattgtaacgcactcaagtcggtatcaaagagtgtctgcacattactaccggtatcgttggcgatagggacatcgatagttaggtttggattgccgccaaacaacgccgggagtctaacccttgcaaaaagctaataaatcagctaaagtagatattagtaaatatatagtatacctgatgcatagcattcccgggataaaacccataagaggtcgactgcgccatctgcactagtgccggctaggtattatagatcaatgatcaatcctaggccactatagtaccttattgttttgaggtagttacctggggaggactctgctgcatcaactgatggaaaattccctagagtggtcaggaattattaaaatgtaacgaaggtagaaggtagagactaacctcggcccatacagcagaatgtaccataattggcggaaggtcattaaggcgaggcggcggatccatgatctgccccttgcagatccagatcgtctgctgagtcctgaccgggaaagacgagcggcccgagttccccagtctcatacattcggatgagtccttcaatattggttctctggcgttgtattttgggggtcggatcttccaggaatttcttgagctgctcaatccgttgctcaggcttgatgactaggggattcggacagaatgggcgtggattgaatgggcgtgggctggcatcctcttgttgcgccattttgaagacttgataaccgaggagttaagtaattctattcttggggaatagactgaagagggtatcaaaaagtgtagagggaaagatagagttaagagctggcccctcttttgttacataaacggcacgtgataactaactaactaactgagctttttccgtaacaccaacgcacgtacgtacgaccctgtgatttatacttgcttcgcttcgctccgcaatcaccatttcctacttgcagtcatcaaaatctttctttcgcctcacatgttacttctatcgcattgcccgcatgatcagaatcatccctggatgtccacatgatgtcttggtacgtacataccactcacctcacgtagtctactcggtctatttagtctatttgaatccgttttacttcttccaagctcgcaatagaaagaatctaaacatgaaatttcatagaattacaggacctgtcattttgataatatagtttacctagttaagtagaccatcttgttctacatatatcacccactcatccacacagaccattacctcccacggaacgccggcttccgcttctcaacaaaggcgcgcagcgcttcataccgatcatcagtctcaatgactccctcataggccgcattctccgaccgctcacccagaccatgggcctcgacagcctgcatcgccatcttgatagcaatagggccaccctcacagatatccagtgcgagcttgatactctccagcaggacgcgttcacgcgcaacgccatcctgtgtctcctcttcaggaagcacctccacgagccggtcacagagcccaatgaagtaagcctcaggtccggtcacccggcggccggtgatgatcaagtcccgggcgcggttcacaccaatgatcggaggcagtcggtatgtaccgccggcgccggggataatagcgagacgtgtttcgggaagaccaacgacgctagaggacgagaaaacgcgcaggtgcgtgcacagcgcgagctcgaggccgccgccgagagccacggacgagacggcggagatggtggggatttcgagggaagcaaggcttttgaatgtggagcggagtttgaggaggaagtcttcggtactgaatcgtcgcgttggatagttagctgcatatgttcgcgtaaattgaaggcttcaagcccgggtacaccgggcaccgggcaccagggcaccggggaaaccgggtatagggttgtttctcactcggccatgctcatgttggcgcgttccttcaggtctgcacccgcacagaatgctgcgtctacgttactcgctataaccaacgcccgggttggcccgttgcctttttcggcggcgatggcttccacatgcttcgcgagcgtgtcgagtaactcggtcgagatcgcgttgcgagcttggggcctgttcagctgcagcacgcgcacatgccctgagcctggggccgggatctggtgggtcttgataatgtctccttctgtgcttgtgctgtaacgagagacgaagacccgggcaggcaccgcggtcgcccggaggtgggcgagaggtgcggagaggcggacgaggcgcgatgacatgatgcttgtcattgtgcaattggcaattcaaaagatcgagggggtttacaccgcgatattaaaatgatgacagaagattactgcgctaaaaggttctcgggtggaagatgttctcggagctcgggtgtggggaaagctttgaatccgacgattaccgaaagcaacatgaacagaataatatgggggggtatcatgtacattgacaaaagtcctataaaactacaatattatatacacatagtcactggcagtattctgtaacctccgcatcactcggccagtcccagcctgtccggctgataaggtcgcatgcctccatgatcaggtccgatggtatccgcgtgtcgattcgttgctgtcgtctttccaaaaacaccctgatcgccacaagggttcgacgcatcattttgtgtccatttgcatgttcatctgcagcttctttcagtagatcagctgactgactcatccagtgcagcagatgcaacaacccttcgtcatctcctacggaccccaaagcccgaacaaaagcatgtagcgtggcaggtgatggtatttgcagcatcgagggaactttgagctgtgtttcggaaacgatatctgctgcaaagatgcttcgctccgcatgctccgaggttttggaggctgggagaacgagatgatcaaactgatgcttcaaaacctgcagcgcatgttgcatcaaagcgtcaatttcgtcatcaccctcgtttttagccttgagacgacggatacgagcattatggatcagcataaagctttgttcggcagtgccagggtgtctgagggcagcgtcaatggctttcgtaaatgccacacataaaatgcggaatccttcctcgccaagttcgacatcgcgctgtcgcatccagctcaatgctctgagagcctggtgccatcccagtatgcgctgaagacttcggcttcttggaccataatacccagtgaggcgctcgcgggtcagagcagataaaatgtgagtccaggcaggggtgtaaggagcacgtcgcaatttagtcaattggatcgcgtgccataaagcccttggatgatgccggtttcctggatgttccttggagtatgcgataaggtctattttcgcaccagtcgaagagtcggccgctatcaatgccgggaaacggtcggttgtgagaatatttcgattaccgctatccagactggatatatctgaatgtgtgcataggaacttgatgaacgatgcaaacaccaagtccggcaattcatgaaaagcttcaaggtccaaactgtggtatttgcggggcttggcccgcacgatggagagcacctctatatgagcatctgtcaggccactgcattggagataatacaatccagaccgcagagaagtagccgactgaagtagtaggctgaggaatctcccagagggccgaagcccttgtgcacgcatctggtcaagtaactcatccatggtaggcggttctgtgggcacatagataatgtcacgagcggaagccggttcggcgtgaacttcacggccatcccctggaagagcatgactcatttggtcaaaatcgcgttccatggcgtgtcgtcgatatattaacttttcagccatggcagcgtagatagcaccctttgggggtagcccatgatcctgataggagagaaaacacgcccaggcctcacggacagtcctcgtagaccgaatgcgagcaacccacatttcgtgatgattggacttagatccatgtctgtccggtaaagcttgcgggcgacgcatcatagctctcgtctgcactgtcgggctgtgatcggtatcccaaccggccaaaatcgaggatatgtcctcccacagacgatgggaatagccagcatctttcatttgtgaaagtacctgcatcgcacggctgaacatcccctcattcccgcgctgagaatcaattcctagtttctcttccttccaaggaggccatgacggagctttaagttcagcagactggcgctcttcggatgttttcttatgggccagttggactgcaacaactgctcgatatccctgtcttgtgacgggaaggacgggcttatgggttgccatagctcgaagaagctcaaattgcgcttgctgttgaatagatgtagatcggtaaggggcaatgttagccggtatagaaagtaaccagagacattcattaaatttgacggttttgacgcgatcatcatttcgcgtcaccaaagctgacctctcggcgttatcagcccttggggctgagaggaagcgagcgaatgcacgtgaaatagtgagaagtgattgtggccacactcgccgagcatgacggattaaacgaacgaccaaaatcatacaggtgccagaatcgatttgagggcggaagacctcagggggtagctcaagatcatgttcggcaaccccagaaggagcttcggcaatggggaaggtatgtccgctcatcagatgtaaagagtggattaaaagcaaacggaacgtgtgagcatcgagattttgctgtctcaaaagatggaggggaatgaaaggtggaatgtttgggctagcagcgccagatttggctctgtccgtttcgaacaaaaacagccgtaccattgcctcgtgggcattctggctcttcatgatccaggcccaagcagtcacgtcggcggcatcgtagccacgcgatgataaataatcatggcttgtgcttctgaataccttctgcagagcgatattcaaatccttctccgtacttttatccgacacagacgaaagcaacgggtccacctctcgtatatactccccaagaataaccggcagtgacggcttttttggtcgaccaactgtcctcaactcgttctgtgtttggagagaatatttggaaagagcccgatcaagcccagctgactggccgtcatatccaagggggtggccagtgtttcgcaaagctttcgagaggtattcggcgggcttcggtttcactctgatgctggcggtcttctcaagccttttctctctgagcgagctattcaccgattcttggagcaatgctgcgcattgttcgtcaagtgatgaatctgatcgctctttattgaagagattatccaaatgtgagtgttgagtgtcgattgcaagtgactcgggcacattgaggaacgccgtggactgaaacgaacggaaactgcctgggcttaggccagccaggaaattgcgcgaataatgtacggaaaacttggcgtcatgataaaatattgcctaggacatatcaagttctttagcactatgttcgatgacggggagtataagaagtcaccttgtataaacgactattgagcaggtctgctcttagccgtgatactcccgaaaggcttcgggcatgcttgagaactgatgacatccatgaacgtagtcatgggtgaaagtgcctggacgccacagacccattcaataggctcaaagaggtaatttgtctccgaagatgagaaaaagtcaagacattagaaaaatacaacaatcgcgcggcagaaaattgaatcacgtgatggatcgtcagaaagcgcgccattccgaaaagcgcaacgcagcgaacgttctctccagcaaaacagaaaaaagagaacagttgacctatttgttcgagggttttctattgtattgatcattgtcctaatactttggtctctattgacaattattcctgctccacattcacatcttttattgtggtgacgtgaggatttgatcttccctcccctcgctcttcgcgatccccatcttctctaagaattcgctttcacgccctacccatcgaggctacttggattccggttgctatccgaaccaaatattcacctcaacactaaatcgccagcaaatattaatttacacgatcgcatcctcccaatctttccttcaatcgtctgatttgtggaccccatcgatttgcattggaggggatcgcgtcaaagcaagtatcgtcaaccttgacctcggcgcgacttcacaaccatgagcgccgacgaagctggagacacaacccccatgtctaccacaaatagcgaacctcatcccgaccctgctactaatgcaacctctgggaaacggaagcgctccactcaggacgacaaaccgagcactgagtcaagtgctccagcctcgcgcgatcgaacaaatctccatgaaactcttcgcagcctgattgagcttcttctgaagtaagctttgatgaaagtatgctctagtattgtgctgacaggccgcagacatgacactgaactccaactcctctcttgccccttcccaaactcaactgctaagcctcgaacgaagcgcgcaaaggtttccggcgattcagaaacctccaacatccaaacacgcgtcaattcgggcaaatacaacacgttgcaagagtttctttccgacatcgaaagagcatcggctgctgtaattgaacgcaatcaaacacaggccaatggcgcgaaagaagatggggcacctttgaatgaggtggtgaaccggatcgcagcattcaagaagcatatgaacagcttgattggtcaatccttcgtcaatcaacccgaggtcaaaacagagacgatggaagacgataccgacgaatcatcagagcttcacgcgatcaacgtctgtcagcgcgaggataagcctgccctaacactcttcgggaacccatcgaatcccaggcagctattctcgagtcttcaaaaatcggtgaaggtgccgttgtccgaatcaggacctgagaagtttgttgaagtgcaagaggagctgcgcgaggtcgccctgcctaatggcatcgcagctaccaaagtaatccctttcaaccttgatgctgctcaagcatcgaagcgaacatttggggaagtgtttgcgccacgcgaaacattaccaaagctagaacctccgcgcaaacgatctcaccgggctaattcggccacatggacggatcgcttcgacgccactttcgatgtcaggacatttttgggagagcgtagcaactattgcctggcacccctcccttcaacccagtggcttcaatacggtggagtcacttcatcacctgcctactgggaccgtgtagaaaagcatgcagattcggagaatgttcatcgccatggagatcctgctctttggactggccctgattcatctgctttccagggtgtcttctcgtcatttgctccctcttacgacagctctggcgcgattgtacagctcgcttcgaaggacatggtctggtggggacaacggggtgcggcccgcatgaacaccctgctatcggtggaagcagacagcaaacaaaatgacactcagaccgcccagcctggcaatattggcgaacttgatgagagcattctggatgaaatggttgagtcattcaacgcccaagactttgctggagacatcacagaaaccgatccgattagtgaagtcgaaccagaatcaaaagagatcaagcaaatgcttcaggatgtttccgacttgctcgacactcttagttcctaccagcgactccgaagtctcaaactttcctctgatctccagctgcctggtcaacaattgcctgagtcgaatgaaacccctagccttgatctgggcgatgtgaacacgccctctgaagcagagacccttgtttatgataccctcaagtcaagccttgctgcagtcatcagcaacctgccaccttatgctgtcgctaaactggacggtgatcagctcgcggagttgaacatcagccaaaaggttttggttgacattcctgactacagtggtaccatggaaaaggatgacttcactttgtcacaagaaagagccgccgcattgctcgcagcagccagcgcagcaaatcgaacctcaaccccctccgcctcacgacccagtaattaccaaggctctcacagtgcctacaaccaacgtgcttttgcttccaatgctcgggctccgcctcagcccgggttccaggtcacaccgcagcacgcacggcaaccctcagttccaaatacatacacgcatgcttatggcgcggggcgtccaccgagcacacccagtcaacgtccagtcaacacccctcaatacgcgcaaatgaacccacagtacagccagggcagccaagctccccaataccagcgccctacctccaatggatatgcccaagtgtctccccaaccttatacgccacagcccaggcaaccaggcacattcaacgccacgccacaggggcgtacgccatacgcgactgccaccgcgaaccagcgagttcagtacccaggccagactccttcacaagctggctactcaaactcggccgctagtgccacatactctcgtagtgcggccgaacaagctgcgctgatggacaggaacaaggcgcaactagctgctcgacagtcaggccacagcccttcaacgcctcaacctcaagggtcggatgcccgtgcttcccaagaaggcagcatgacaccagggagcaaagcaaatggtacacccctatccacgtagggcagatatttgcactaatccaagcatgtggcattgtgttcccattcaaaaatgcgatttgtttctaaagatggaaactccaacattacatttctctacagtcggctttctgcttttgactttttgcattgttcttctctctctttcgtttccaattatgagctctgaatgtgatccgcgtccccaatttcttttctcccaactgtgtttttaattaacctcttgatcctcggttttgtatgactttactttttggtgttgtattatggactaagcgattggcgtggatggttttttttcaagactggtcggccggggtgtataggctgcctctgcgatacagctaagtcttgcttagagagttacttgtttctcgcttccgatgcaattcaatcaatatgctgcatatcagcacacctcgtgctttccatggagattcgactgtaaagggggatattgagaaaacgagctttcgaagcgttcctaaaatcatatctcatacagtacactgctatccccgatataaaaaaatacccatcctgctatagtatctcccagtccgctgtatcttctgcccaatgctcatagtccattacatgccaaacccgagatactcatctatctgccctatccaattattgaagtaatcaccggaaaatgaacgccatccctttcttccgtgcccagtagtgtgtacccatccaaccttcccttcacaaaaagacaaaaccaaaaccaagaaagctcatcgccaaggaaacacacaaaaaaagaaaaaagaagattcgtaaatcataagagttgatagcaggcagaaacccaactcacgggagtagaacatcgaagctagggaatgaacatagcagcaatagccatgaaaccgaagtatctagaagcaaaaggtcagtctcaaacgcagccagaacagagtcgaagcaatcatacatcgtagcacagcgccaaccatccctcgagtcgaccagtgtatcaataccagccgagtaattcgccgcaatagccgcggcggcaccaccaaccaccgtcacaacgaccagacgaccagagaactccgcaataagactgaacgctagcagtggcaacaggagcgcacccgatgcgatgattattgcgacgtagacgggtgctgcagcggccgatgcagccagtcgcggagtgagtgagaccagatccgcgtcgtggattaggaaccgcgtctcgacaccagcgatgggcttgtgctctctcatccagccgcgatagtctgcgatatcctgttccgaggcccgcgggagcgtctgtaggactttgctgtacgcgcagagggcgttgtctgcgtgctggtcagagggctactttgtgggatagcaatatgggaagtggaaggagcttactgtattgttcggtcttttggatcaaagtgctcatgagatccatgcggcggtaatgcagcgacgagtaagcctgggcctgggcgtcccgtctgcgggaggccgggaagggctttgcgccttcctgctcggctgtgctgactcgatgtatttcttcgtactcatctagcgtgtggagatcttcttccatttgggaaatctcgtcttggaggtggaggaggacgcggtggttgacggtctcgaagcgtcggtagagcggagggaagcttccgctctcttctgaagcggatttggttaggtgcgaggctagaagcccgtatcccgatggctcttgcgatacgttggagtctcgtctctttgtcggcgtggtgcggtgaagactatcttccgggcttcttgggggtgatggtgggagcggtggtctatggatcgcaccgttgtctcttggcgatccatggtaggtctgtggtcgggacagttctagttcgcctattcctggagaggtttgcgcagtcgagattgggctcggctttctagtgggttgtctcttccgggtgactaactgattgcctgtagaaggcgcgggttttcgtggctcttttggacttttcgatgctactgggggtgactgggtgactttcttcggggaaatgttgcctcctgagaccaacactccatgtggcacagtgtttgtccgcggcttaggagcctggatctgggtggtggattgtatagggcgtggaggctccggctcctcgtctgattcagactccgaggatgacgataacgaggatgagtctgaagatgattcatcgttctcttctaggaactcaaagacattaggcatcttcttcgactctggcttctttgggttcgctggagcgacaggcgcatttagggcttgtcttgacccatttggccgttgtgaaggtgaactgttctcgacagttttagggcttgcgacaggaccagcctgtgggtttgtagtattggacaccaacgagtatgtcctctttcttccatccttttttgactttctagtttggagcatgattatcggataagttcggaatcaagacccgattcatacaaatcagggcataccagggaaagaggagaaaaagagaaaggaacatgaaatgaatcgtagtagggaattcgcgatggaatcaggagaatagggactcgaggcatagcctaggggtggaattcaaggtctcagatcgagtgtcaaaaggtgcggaatcctaggaatctagggggggttgatggaaaatagtatatctccaatttccccgcgaattccatcagacattctctataataaaggaaattggtattagtattatcgaaacacgaaacgtcaggccaacttccaatgggaataggtttgtgtcagctgaaaagcccgaatggttatgaagacttgtaattcgtcacacgagtcagtccgggaacaatctgaagcaacttagaagcgccgggctttatttagatcgaccaatgataatcgtatcgcaaggagcttccttgtatccctgttgatcgcgattcaaagaaaccaagagatagggaaatggtgacgaattgccgagttgaacattctgaacaattcagtgtgggccaagttgtgacagcaaatcaggcctgcagagtctgaaatgcaaatgcatgtgtgtctgaacgaagcaaaggaacatgtatgcgctggtcgatcttccttgcatctggcggtctagcgaagtgggggaatgtgctgcagctatgtgagcagtgtacgatgcagtcggtacaacgccacctatctgctatattacgtgcatgaagcatgaagtgttaagaatgtattgacatggagttgagtagttatagagtgtagtgggtactaagtcagagggtaaatggagatcaagtacggagtacagagtatgttgtatagggaaggtatatatgcagtttcatatttttatagttttaaataccattattgagtttataatggcgatttcctctgtgtcacaacatacaatataggtacaacatcgtatatcaagtgatggcatctccgttatctgggctgcttctagactcacctgacgctttaagtatatgtcagcacggactctggaagtcacgtggcgcataattgatgaccaatcagttgtgacaacaatagtgatgcagtacgacaacactcttattatccaactctcaaagctctcaccttgacttaattcgccagattcctataaatttcatgcacattagcacaaaccctatagttgttaacatcagattttactttcgatccctgttgggctgttgggatcacactgtttctaccaagatacaagttcgtcgaattataaacgcaagattcacacccacgcacaagtcatcctcagtgaaacctacacgagtggcgctctagtagctatttacttctcagattcagataatcaaggaccgtggtttaggcggggctaaagaccaaccggagacagtttatgcgtcagccgctgaggtttcggcggactgtgaagcctttctgaggaaaggtagaactctaagtattatagacgaacctctgattgaactgctgcaaagatgaacaaatagaatgacagtcgctatttgttccagaacatgcagcttaccgatattctgagtaaccgcggggtaaagcatttacaaagacgtctataaagacacacatcctcctgaacacagcacttcccctgatataataccaggaataccaaaatgctaccactcatgaaaggcaaactaatgctctttgacgaagtagcttgggacaaaagcgacgagcaactagcaacatgggaagcaattcttctcaaccaagaaaccatgcagaagataaccacattaatcaaaatccaccgtcaaggcataacagatcaactcttcccgccacaaaaaggctccttcaacatggtgatccgcctacgattcctcgacggcgcctcggccataatccgcttcccaatcccaggctactcagtcttcccagacgagaaactccaccgagaagtaagagtgatgcgctttctcgagcgacacacagacatccgtatcccgcacatcctacaccacggcaccagcgacgaaagcccacacggcctaggcccgttcattatcatggagtatatcgaccataacgcggatctcgtggatgcgctgaacacacccgggatactggatgaagaacgacccgttctcgatcccaatatcggcgataacaggctgcgctcggtatataatcagatggcgggcttgttgctgcaggttgcgaagtactcgttcccgcgtattggatgtatatctaatgctgcggaagacgagttcgaggatgagtgggtggttgcgcaccggccgctgagtatcaatatgaatgagctggtgcaggttggtggtgtgcgagctggggatctgccggggatgaccgagacgtttgcgactacggcggagtatttacttgcccttgcggagctgcatatgacgcatctttcgtcgcaacggaatgacgctattgacgatgcggaggactgcaggacgaagtatattgcgcggtgtttattccggaagcttgcgagagagggccgactatcttgggctggggaggaagggatgtttaaattattctgtgatgatctacgaccggcgaatgtgcttgctaactcggactttgggtataagatatccggggctattgattgggaatttgcttatgctgcgccgttggagtttgtgtatagcccgccgtgctggctactgcttgagcggccggagtactgggataatgggcttgatgactgggagtgggtgtatgagagccggttggagattttcttgcaggagctacatatgcgagaggatgttgacattcggcgtggggttatgagtgaggaaaatcggctttctagacatatgcgtgagagctggaataatggggggttctgggttagttatgcggcgagaaggagttgggcttttgatgttatctactgggcgaggattgaccgtaggttctttggagaaggaactttggaggatcggatcggattgttgactgttgaagagaggaattcgatggaggattttgtacagaggaagttggctgagaaggaggagggaggtttgatatgaagtttatatagggcataagttgtagttatagggctcatacaccctatggtcacgtacttccttggaggtattccattaatacatagctatgaattaaatttgtgtatattcacaatatcctaaagatcttcttgcacctttaggacttctagatctgttgatttcgtcatttggaatatcttcaattcaatttgaccacccgagctcgtcatcgcacgccccgagaaccggcgccattgcggggaaaccagccaccatcgaaattctttgcaactactttgtatatctagtatgatttgccttgctttatcatggaggtaatttgggtatttccttattcctcactcaactaatgtgaattcttctcaggtgccaaaagcccggggagctggcaggtcaggcccgcgtcgacgaacagggtgcctaacatgcaggtcccgtaaggtccgatgcgatgaagcgaaaccaagctgctccaattgcgatcgactatgtctactatgtctgtataaaccacgcaccgcacccggcgtgaggttgggttcatcgccaactcgtgcaaacaagactactgcatcgaataacacagcacactcggggagttcaggctcctctgctgcagccacgactgcatcccgctctcccgacataaacttctttaataccgtgctccgcgcagacggccacacaatacccgcgccaacaaccacacttcgacagctccctacagaccagggctcccacccttcggagtttgacatgctcgtattcatgggcgggattacttctgagctggaacagaagcacctggacctggctgccggacccgcgatgactttgaccgctagtccagcgtcgcagtcgctacccgggacactcacaccagaccgtcgcattcttactccaaatacctcatcttcgggcagcgcttcagacatgccaactagccggggcagcttatccgatgcaggcggtatctcgtatgaggaccaactgctacagcactttctgaccattggcccgccggctgctctttttgcgccggtcaacatcgagtggaagtatatgcgcccagcgctgctggttcatgcacgagattccagtccgcttttgaatgctttatactgctacgcggatgttcataaagcgatgatggaagggaaaaaatggcactgggcgcctaccttctatagagtggctagttcggagatccaagcttgtattcatggcgaggtgacggagtccacactcatcaaagtttttggggctgtttttctcttaatgatatccgaggtatgttctgcttagtcccgagatcgagcgaacgctcatattatttcagcttctctcaccctccggaatatgtaccggaacatcttatattcactccgggtaccttattctacaacgattccatgatcgtactcgacattggaccggtctcggtcatcttttggtgtcatggattttactgctagatgtcaagtccctgattgcaggccgagatggcgatcctctccctgaactcggcaatatcccagaacatagcatcacacaaccaccggatacacaaacttcccaaacatctcacataaccgcaccaacagccaactttaaacaagaggacatcatcgaagacccattcctcagccccaactacctcgtctacgaagcaatcgtaggcccggcattccgattcttcgtacaagcccaacaagtcgtacgacgcatagtctgcatcgacctccaccaccgcagccgcggaactctcaccgacgagttcgaagtactccaactcgcccacaaaatcggcgccgatctcgaaacactctggcacagacgcccctcagtaatagacgtctacggacggcccgaagctctaactgacatcctttgtgcgcctgtggcatcggaaatctgccgcacattccgacaatacgtggccaacttcttagcgaattttatctacttgcaccgcgttgcatttgcaatctaccctcgcacagaacgcgtcaacggcgccgtcgatcaaatcattcaactggccaccgttgactctgccgggccagaccatctgcccgtcagcttcttatggccgctgttcattgcggggctggaggctacggaggaccagcgcaagtggattggccacgagattcagcgtatggctgcggcccacgaagctgacgcggcaccttcggccactcgtcacccgaccgctgatagggtcctagtgctcgtggaggagatgacccggcggcaagatgtgtcacgcacatgggcagactcgaaatgcgtgaggcgggaaatgttttcggactttttcgttgtgatttgaacttcatgttcggcatgagaggtgtagagattttctcataaaatataatacgaagaacctacaaccatttcaaatattctaaaccgacccagatccaatcgctcgatatgacactttatctccgcccatacagcgtgatcgatgcagtaggtgtccccgttccttgcgcacatacgtcgcaaaacagaccgcagcgaccgccacagccccagaactgatcatcacgggatacctgaactgggccggcagcgggaaagcaatagtcgaggcaaaagaaagcatctcgaacacattctgcagcgccatttcagtagcagagaagcgggcacgggcatgttcctggatattctacatcacccaacaagtttagcacatgcacaagtcaagaatacggaaaagccacttacctcctgcacgagaaactggaccgacaaatcgaatccccaaagcccaatccgactcaaagcaacgcccgtaatcagcgcacccgctacgaactgcgagctagggtcccagaagacgaaagccacggtggcagcagcgatgcagataaactgccaattcagaaaccacagcccggagcgaatcggaccaatccggttcatgaccataggcgctgtccatgtcccagatagctcggcgaccacggagccgatgcgcatatagctgacctccaacggggtgaagcccgtgtgcaacaggtatgttaccattgttgcgccaaaggataggactgttaggtagagcaggctcagggcaaaggatgctaggaagacggggcttgctatgtactctttccagggcgctagtgagcttgacaagcagcgggtatcgctcttgccatttgtatcatctgcttgtgttgtaggagcttgtgtcttggtcaaggccgggactgattggtagacctgagcaatggccaaatactcgaccagcacagatgcggtattcatggtaaacactgtccaaattgcatatggggttgatatgctgtcgatcaaggagatgaatactggtgctaggagcttgcagaagagatcaattcgtctcatagaggcgttcaagtctgtggttcgaagttagatattgcggagcttcagctagcttcagggttctcaccttgtcgagggacattgatactttccgagatcacgattgcctagtgtcaaattatcagcgacatctcttcctaaaataagattgtatatcggatgcatggaaaccagacaacccaaatacgattcctcgtacatacccagtcccgttccacagccaccgtattagccgtagcggccaatttctccatacaagccagtaagccctgcacggtgaacaaggcaattgtaagcgaccaagagtctgtagacagagtggccacaaagcataagcatgagatcgcgacagggactctttgccacactactcctttaattagccattggccttgatactcggtacatattgaagtatccgaaacgattccaacctaccaatggaatgcctcacagcaacgagccggtctgagcgatcaacttgcgcacccagccacgacgacagcgcgacggctgaaaacgcccgcactagagcgtatatcgaagcatacagtagtgtccccgggaagatcgaagctaggaagagtacggcgccgaattcaaacatgcgggagttccatgttgagagtgtgtgagatatgtataggcgtgttagtactgagtgggcttctggtgctgggctatcattttggggtgggccatcatccgccaaggtcggcaacagagggttggaggaattgctgatgtcttctgatggttgccggctaggctctgggaactcgctcccaagaaccatcttgaagcgctgctggcaatttacagcatgtatgcaagtgtcgggtcgaatgcttatgtggatttgacagcaaattgggcggatcagcaatgccgtgggtgggctgaggaccctcgtggaaacttttatatcgtattgtctatggtgttctatttgtacctttaaatctcattaggtttgagtccatccattgagtactacagttattttctatttgaaaatgatcgttaattgcagattcaggatttgcaataatagtatggtatatgggccaattcccaataaattctaatacacccgaacagcaaaaattacaagctataaacggtatcccactgtttaatccaaccacttaagtccttcgggagatgatgtcgttgtccgtcgggcaatcacctcgaccacctttcggcgcacaccttcgcggtgggcgtatttctggaggaagtagtcgatcacgggtctccgcgatgaatgtccctcacacacaacctttttaatctcatattcggagggaagggcgaagtgggcataagggtatttagtgtaatctccctggctcagaagcggtaggcgggactcgttgtcggggatctcgaagaagtcgtccacaattttatccgagacatcttggagagtagcgggctgccactgggcctggcggggaggcttggacatcagacgggccttgacaccctcgacgaaatcagggtggcgcatgaatttggcggcgatctcgtgctcgcgctggaaggtctccgtgatggtccacttcttgccaagacgcatctggcgcagagtcaccttcagagaggtcggggagcggcctgacagagtctccaatgtcttttgtgcccactccttgtgctcagtttccttctccaaggcctggataatctcttccatggtgttgaatccgaagcagcggtcaatggcagtacgcagggtaccagccatgagcatcggctcctcctcaagcggggggaggccaagggagaactcagccatggtcttgttcacaatttccaaacgctcgcgaagctcgacgtggtcggggaaagtcagctcggaaagacgctgagtcacactgctcagaacactggagtgcaagtagtgtgtggcgatgcctgcgtacagagcctgaacacccttcaagcgctccgaggtcaaagccaggtatgtaccggtctcaccatccagacgcgggaggaagaaggaaccgccaacgtcggggaagaagccaattgtggtctcaggcatagcaaaaagggtacgctcggtcgcaattcggaagggagcgtgcatgctgaggcctacgccaccgcccatggtgattccatccataaatgagatgacaggcttcgagtatgtagcgagcaggtggtcaaggcggtattctagtgcgaagaagtccgctgatgctttttgtccctccactccactctcattctgcagggccagagcagcaacgtcacctcctgcgcagagagccttggtgccggctccggagatgaggatcatgtttgcaagatgagatttctcccactcctattcatccaacgcttagtattgtatgtgtctgaagttccgggtgtccattctaaccttcaatcgagggacaatcttgcgagccatcgagccgttgagggagttgagcttcttgggtcggttgagttcaacgctgcggaggccgtagatcgagttgaacaggacatcatcgcgctcatcgccggggagctctttggggatatcagatgaagtcgacatctaacaaatgtgagcactggatatcgggcttctctccgaatagggtacataccatagctgttgcccgaaaggcagggttggtcaccttggcgcgtagaggcattgctgaaggaacgcgcgagatccagctcggcgaggagacgcgattgaattgtcgaagtaacattagaactggaatacgacgataaccaaggaagggcgttatgtgatgacaatcaggtatttctccgctttccttgacctcgggagtttttcgctggattttctttccgctccgactctccgcccataaccgaccagctcccaggtacattcggcgacatcaccgcaattgatgtcaatttctaagtggtgtaaatgaaaatgggttcaaatattctaaaagtgctatgatacaaaaagtcagctaagtactgaatatgttgtagctccaaaaccgactctgagaagtgataacgttcgaagtatagatgatctatttgtacacagctagataatgccagaaaaacaagaaacagagaatgatacaattaaacgttgctccatgtggccttcatccggctaaagtccagcggatacaccttctctccgtttgctgaaggcgaaaagagagtgtccaccttcgccaagtcggtcgaatgcgaaagcaggatcttgtgcagtgcattcttctcaataatcaatcttgctgtctccaagacattcttcacatccaaatcctcgacgctgatagttcgtgcgtggttgccgaacttttcgaccgcatcagagaacatctcattcggcttcagtgtaacgaatgtagaccggcccttctgataccagccatgagctttgatgaggtttatgatgaagaacgggctcgcattctcattgatatcgatactgttgtcaacaacaatcaattcgccgcgtgaaagccggtggctgagggcaatacgccaggcttggtcgtagatctttcgtggcaaatcggtcgagaaatcacgaggatgaggtccgaaagcgacaccaccacctcgtcgaactggcgacatcttgtcacccgcacgcgcacgaccggagcccttctgcgcgtacagcttcctgtgactaccgtgcacatcgtccctccacttggtgctggcggaaccttgtcgggtgctgtcgccctcgtagacgactgcgcggtggaggatatcgtgacgagtgggcatctgaagtagccgccgggagtaatggactaaacgctggggttccaagttaggccaccggtaggtcatgacttgaacaggggttgggccccctggtcgttgcgcctgttggacctggacagcatccttggtcgccactgggggctgtgtagtggcttcggttgccattgagcgtgtaaggcatcgttgctgtatgattcgatacgctgtcagtaaatgcgtccgagaaccggatcgagaagaattcatggagtgcactaaccgtcacttgcttcgggcctgacatgagtccgcccgagctgcgggacagcagcctcagtgaccgaataacatcgttccctggcattttgagagtcactgggtgatcggcgtataacttgatgatgtccggagtctcgaatggagcaaaagttgatcccgggcggtaggtgctagcagaaccttggtactatagtacccaagtatcttttgtatgattttcccttacaaaagatacttagccgcataatacacaatatgaattctcttgtccggttgcattgaatcaagtgtgtatgtcaagtataatttaattgtagacaggactttttaatttattcgatgtcttgatgtattcccgggcctggataccacttggaggtcacgtgataggttaagtgaccgaacagaaaaagttccccgggaagacaacaacatcggatcctcaaggccaagcccaccataacctccaattcctcgaatcatggcccactgcgagcgggcttcgaagcctctgctccaatgccttcgcaatacctactctagaggcgtggctggagtccagctccaaacgcgagccttccagtcgaccgcgagtgttcgagatgccgaagttgaaactccggcccaacctttccacaaggcacccgatccctctcttgtgacgagtccccgtctcgaaagacgtttgctccgacagggaaccgcccccattggatcacgtcgtcgccgtgctgcactccaagattcagagaaccttcccttcgaacaattgccctaccaatgtttccaagaagcccggaagattttgcttgcggaccgcgaagagaaattgaaggagattgaaatgatgaggcaacgccttgccagacaggaggctttgtccgtcgaagaggctggaggagcaaaggcgaagaaatcccgtgttactgccatgcaattacacctggagcgcctcaaggttctggccgatattaacgatcccttggtcaagcgaaagttcgaggataatgaaggtaatcatctcttgatcaagtgatcaacctgggctgagactaatcgttcgatttctaccaatccaggtgacatgtccaagcccatctatcgctttttggccgaccgcaaatggcgcgaataccgccgcaagatcctggtccagcgtatcacccagatgaacgtcattcccgatgtcctccctcactgcgaccccgtcgtcgagacaaagctgtacttcggcaagcgccaaatccaagccggtgaattcgtcgaagcgagactcagcacgagcgcgcctaaactcgacgtgcaaatctttgaggctggtgaaaagctagtcactattgcagttgtcgaccctgatgtcccgaacgttgagaacgacaacttcgattataagacacacttcttggccgtcaacgtccccatctcggccacctccaccaagatcgatctcgcacagcttttggaagattcgcaggtggttctcccctggctaccacctgttgcccagatgggaagtccctaccaccgcctctccctcttcattatggagcagaaggagtcccagcctctcgactttgccgccgtcaaggccaaggagtctaaccgcgacaccaccctccttcgcagtctccagtcccgttaccatctcaaggccatcggtgctcacctgttccgtacccaatgggacgccacgaccctggaggtcatgaaggagattggattcgacggtgctaatgtggagctgcgccgcaagagagttgagcctctgccatataagagacgtaacccctcttcgttccgctgatcttgtttgtcttcaagccattgtattgtacaatttgatatatgtatgaatatgcacactgatttaatccctttcaaccaaactccatgcgtatgcttaaacaaaatggaccagagtgccacgcatcggtattgtaatccaccggtctaatataatgtacaatgtataacccttagatgttctgggaatccagttgcgccggttgcaacggattggtcacccatcccatcttcgacggaggccataccctggcaattatcttcccattaatgagacccatgggcactgggccgtagttcctcgaatccctagaccagggaagattatcgccggccaaaaagacatgaccttcggggacctgcacaaagtcaagtcagcaattgaatccaaccagaacgaagaacctataacccacctgaatcatatttccatccttgccaatactcgtgctaagcggcttgtcttgacagacaaaatccccaggcatgcccactacccgcttggccacatgcacgccttgaaagttcgggtgaccatatcgcacgacatctccgacctcgattcctttgccattgcggtggaggcgcgatatcatgagccaatcgcctcgcacgtcgaaggtagggtacatagacgggccctcgctgagctggacagttatcaggtgctcccagatcagcgcgcaggcgcagaaagtgctggtgccattgagcgcaagccttccaatggtgcgcagattggcagcctttattacagaccggactaactgctccatgtgtggtgaattggaagcataggattgctcagatcgagctgcatcaactattccgcggtcgggagctggtcatgtgactatttggtgtctttaaattcgatttttttgctccacatcctccccttctgccatcatcagtcaatatgtcctgtgtcttgaaccagcgattgataggatattgccgtcgcattggattttaatatccaggacccttccagccgtatcagctgctcattaatgtttcgtgggcgctgggctgagagggatctggaatttcattcatgtctcgattattcgaacatctctacaatatggagatgttcaaacagtcaatatcctttacatatactccccataccccttacccctacccaatcccttccgggatgtccgcttctccaaatgctagagcttgccgtcgccgaaatacataaccaggacgagcacgtgtggaatatgaagcaagatgaacacaaccagcctatcttctaataggttgtcccccagtgtgcctcactttgaccccatttcattatgggactgggtttttgaggcatacatagtggggagacatctcaattagacaatttattctcattttcggtttctcatgctccctatctctcgtaaccttcttaaacaatatggatgagattatccatgcgtcaatcaatgtgactttttgtaccacgaatcagcatctaacaaacatgtaagtaaactcgaatcaaagccaattaagaagcatagtacataccgggatgcttctcgaccggctcaatgccctccctcttcttcgccttctgctgatgatccacgccatacctcttgtcccggtcctccagcaacgaatccaaccctgcaggatgtgccaacttcacgctctcattcgatacaaagctgcccatcaactgcggctcgcctagaggcacaggatctccacgatcaacctgccagaaatgatacgtcttgccatagacaggcgcaacgtcttgcatctctgccgtctccgcagcttcccagatagcgtcgggcacaccagctggtgctggcatgaccagcatgccgcttttgacctcgaactcgtgcgtgtgccagagcttacgctcttcggtgggaagagtcacgaaaatccgcggcgagatcatgtattccacgccgatgaggcgggcgtttgccttggatgagtcgtagattaggcattggcggatatctggataagtattaatgcccagcacatcggtcattcagttgtgtttggctatagacatggctgttgtcacataccctctgttaagtgagtgcaatagtgatcggcttccagacatcgagttggatcgttggcgtaaaagtggaatgcattgagatgtgcgcagatttgctttacgggcgtgaagtcttggatcattgaggctccagtctcgagtactcgactcttcattgtccgcggctcgtctggaagttcagttccatcgttgcagcagctctttcccgagtttgacattttgtatatacgttgggttcagggttgtattcgtgaattgttgaattgttaggtgttcattaatagagtctcccataaactgggatttgtactgaaatgatgtaatccatgcttccattgcattgatgtcatgatgattgcggacttcctatttgggactgtttactgctacagcatatttgaaagtagctttatcattggtagaagtaagaaaacgatgatatgtagtcaaaatttatgcaggttgtctatgcggagtatattttatgttatccttaatggaatatatgcatataccagcttcctcatagagcgacatcacttgttcgagcggttgtattaattgcgcttctgatatattggacttaatctgccttgataactcaaggaacagtctccctttgctccaacaagtcataaattggagtttttctcatatcaaaaccgccccgaccatcaaaacggtgctcatatatcttccgttggcagtaagctattgctatatcgtgcactatgctccactcaagcaacctcgtgcctaaagccttattatcggcctcgagcgtctccaaagcctcctttacccacgcgacacaattccatcccggccgactctgtcggacaggcgtgttgcgcataatttcggctacatgatatccgtccaataccttgccaatcaggatacgaacaagcaacatgttgccactgtttagtgaacactcaaactcttcgaagtgccactcagagccccctcctaactttgggctctcgttcgcgtggtaacagaaacccgtgctattctcagtttcaaatttgggccctacaatcacggaccagtggtacctaatcaagacatatattagtcttgctagtgacttcaagctaaacagcgtcatgaatggttctcacgtgtcctccttgtctggcatggttactctgcctcgtcgtgcatggagcgcaacatatatccgatctttgttggcgggcattgcaagtgaagttgaccaagatggctagatatttgctaatgatcgattattgctgaaaggatggtcgtagtggggtcttctctaaatccagtctttaccgggctctatggatgtctttatatttttgtggctcaatgctaaaagctttctattttaagaggagcgtcggaagatctactgcaacccaagtcacatcacatcgtacccaacagcgcctatagcattgggtaaccaatatgggcactttactcggataggtgcatcgtacgttaaattgaaaaaaaagggggccaatggcatttgaagaaactccaaccaaacagaaaacccccgcgaataggactgggcgcatcataaaaatagaaattcgaatgcaattagcggctcagctagcgtcgaatcaattcttagtgtcgtgtcaatgctttctgggggtccctttgtcaagagcatcaagaacacgtctatccatctaagtgcctataaaactcacgagccagtctttctccatctcattgtgaggatcccaataaagggctttggccgacagaaatacatatgtggcatcaccatatttgaacgttgtggaataaggtcccgctagagaaacccgtttatttgcacaaatggttaggaccacggggtatttgctgtttgagggagatcgccatctttgttggctgcactccgccacgaaaagctgtctcgttgccctgccgtctcccggggtggatgagcgagctcgatcggcatagcccctatattgcggactatgataatggctggtgttttttctttcccatttttgtcacgtctattatcattgaaggatacaaaccagaaaaagacgatgaaaaagactataaagatcacaaaagggaccgaagacacaacacaaccggagtcattcccgttgagtcatattcatctatggccttctttccttctttcctgttccatatttcgtcacaaaacaatcaaattgcaagatgaaggaagagcttccgggcttgcaccttctagacgcagagacaatcgtacagcgcctgtgataagagtcaagaccgacaggcctgcctagtaatctagaaatccaactatcttctgttacagatgacatgtttgacgaaatagcctcttttttgtgcactatcgagggtgaatgaggatgttatccgcatagaaaaggaaaatatggaagtatctagagatatagggaataattcaggaggaacggaaaggatggagaaataatgttcctttctatatcaatcaaattcaccaacggtgaaacgaaccctcaaaccattactccctccactgtctgtctatctatatgccatcatcctcctcctcgaccgaactctctgtgacatatgcatcccacgcctcacaagtagaattcaaagtatcataatcaatcagggcccgcgcctcatcatacctctccaagaactgaatagcaaagccctccgaagtatgccatccaatatggcaatgcatcagccaagctccgggattgtcagtcttgaacgcaatggcaaggtacccagaggccgggagcatggccacatcccggcggggcgggttcgtcaagctcgtgtcatcggaggagctgtacgtgcccgttccctgcgcgatgacaaagaagtcgtggccgtgcaagtggataggatgcgggacagccagggtagtttcgatgacaacataggaccacttgtctgcggtcgggagcacaattacgccgctctcctcggtgaatgtcgtgtcgttattccagacttgcaggagtgtcgggttatcccagtatacttgcattgctgtcccgttcagctgccagcggaagtagctatcggagtttgtgcctagtgtgactggttcgctggagttgtagtatggttccgatgcgctctgggccagatacgggacgagatcagagatgtccatgtcgtcgcaactgtcggtgtacgtgtattcggtggtggtgggagtggatattgtgctgccataataaacgatgcctttgatattgtctgcgctgtcattgtcggagcaggcggcttggggaattgcgcgcatccagaaactgtcacttccggtggattggtctgcgctgaccacaatatcgtaccgctgacctagataggaataagggttagtaaagtcatatgtaggttggtagggaaatggtctcttacccatgccgatgttcaagatagttgtggtgaatggctcgataggtaccaagtccatagccatcaccgtcagagtatggttgtcaattgagaacttgaagtgggtatctaccgcagcgttcacaagacggaagcgataagaagtgcctgcagtgaatgatgtgttgaagcgatggcctgtctgggtcgttgaatcgtcatctccatacacattggtaccgttgatgagaccattgtctaatgtaggcgggccattggcctcggcagagtaccagagttgatcaacagtctggtgactccaatcattgaggaacaaaactcctttgtccacatcatagttctcagtggcaggaccgttgatcacaattccaccgaagacaccttcgtaggcttgcaacccaatgtgagaatggtaccatgatgtgccatattgtgtagctttccacttgtaggttgttgtctgtcccggagcagtagggcattgagtaatggatacaacaccgtcgttctggttggtatagttctggcggatgccgtggaaatggtggaaatggatgctagatccattctttgaggtcagactgttggtgacatgaacgataacatcatcgccccagtcagctatgatggtagggcctggaattgtcccgttgactgccattgctgcacgagagtagccatcgggagcaactgtgacatcttcgatgttgaagtaatactctctggtcacgccggtggtggggacgacatcgtagtagttggtgctcacgtcgtagtcgcaccaggtctgtctgtcactggcggtatttccagagcaagcatcccgctttagccttgtatgtttgtcgtgatggatcgaggttgcggaggctactccggccaggatcaaaagagcggtccaaatcttcatgattgcttgacggtcaagaatgctagcaatttgaattttggcggacagacacgaagtaaattcacaagaatgaaagtttaaaaacaaaaggaaggatatcagcgaatgtaatattgttagaaaggactgtcggactatttgtagagaaatattgatgctacgaactattcttatcaacatatatagatccccgacgctctatcattgtgacgccttacaaggcaaattggagctcatatccagtatcaagagggtcagtaagctagtgaaatcaatgacatctgattggacttgactttagcacgacacacacctgagggtgcgtaatctcaaagtccgacggagtccttgggtaacggatccacgtgccggatcgtgccgaaccatggtttgtctatctgcaagcctatttttaagctaattcgaaccgcttgaggggaagatgcacgaagattttctacaaatggactggacttgcacgattggaaactttgccctaatgcaagccaccgtcacgaattacgtggcatatagtatctaagataacaatagagagaaatgatgatttctgaaaactaccatgcctcaattgccacttacatgaagttgccatggcgagtatccgtttttgatcaatctctgtttatcgaaagatgtatatcaaccaagtaacggaacagatatggcccctctacgccctaagcagataggctcttgttctaattcggtgatagaatacaacttattttctatccacaatatagactatcgtcatagttttggagatctcaaccagattgggattaacggacgaactcagcccgacccaataatgctactgtagcctatctcctcttattccaacgagattgcgacataggctgcaaggcagtgtcggagataaagtctccgcttgtttcaagctaactgatattcttcaggtacctgacaggaaccaccacggcacgtcagtcaacgcgtgtcccggcgcgcggcccggactcatgcaccaacccaattttaacaaccccttagagactatgttttgcgatgaatgattggatactgcacgctcaccctaaatttcgactaagtggagctctccctgcgaggacgtaacatgcaaaaggaccatgtaactatatagagaacaataggatagtcagcttcctgtcaatcttatccaaggttaaacatctttctcattatctgctatccactatgttcagttcctcggtcttctgcacggcgctgtgcctgggagcgtccgtgtacgcttctgactttgcctctaggagcactcccggcgtgggtgaggagttcggactttatgcgtatggagacgcaattggtggtctctctctgttctacggaaatggtaggatcttaacattcaccactatctagaaccgtattgaccaggtgctaggcaaggctctgattggtgacccagccaattcgactgcttcgaacacttcaagtgtatactgtcagtgaatcctacaccctgcagtcatgaatttgtgttaatatgggacatactagtcgaacgttcgtccacggatagcacttggatcgccaacccgaacggaaccaccaatgcgaacgccagctggtctgaccagatgctctacattcccagttcgtcatcttcaaatgatgaaatgggcttcgcgtctacgaacgcgtcgaataggactacaacaggtttcatcttctacggacaatggatgatggtgaaatctgattctggcgaaatctcttccagcttctatattagagagaactcggagggcgaagggatttattccttgctgtggaatgcgtcggatgatgcaagtgctattccagtgtccttgcgtactgcgaagccgtctgattcttgagatattggttgcaaggaaaaacagaggttgtctgttgtgatgattagctttggttctatggaaagaggtcgcccttgtcaagtcaagtccaatcatagctatctgaaaaggaatagaaagttttatttcctatctggaaataaaataaatatggctataatctagatctaaatctagagaagaagaagaagaagaaactgtgatcaattcaaagatcatggtcatgcgatatcttcccaagaatgtctcttactctgtaactgacattttcatattaaaaacacttaactagattgcctgaaagcatgtttaggtaacgaccggcttctttgatagattggttaatggtgaattcgatgcattaccaacatgaccttattcccaaggttcacagtccgatcaaggtagtcaagatattcgagccccggttgttcttcctttgaaaggagtacatttaccaagtttgggatgctttcttcttggtaagccgaccatctggaccattaccaccattgaacgcaatgggatctgacaagctagtcgatggagattttcagcgcggctttactaccacgatatacctctcgctgttgttgccgatgcttccttgtccagacgacatcacaccgataagacctttcggagccacatgatgtgccagactttcaacgacccgcatgaggctaagcgaattcgtgaccatcacatgtacaaaatcatcggtggatacatctccaattgtttggttgggtcacgatttgtgattccagcgttcacaaaaaggatatcgaatatattgcccggcaagcgcctatcgagcgccttgatttaatcaggttggcaaatgtccgaggtcctaatttcaacccggccgttgtgattgtctgctagctcgtggagtaatgtccgcgcccctccgccgcgcactgttccgacaacgtttcaccccttttctacgaattctgcgtagcaccgatgataaggatggtggggggtaaaatggagattgtgccgagttatgctcagacttaatataatttggtaggttaggctccttttaaacccagcaagtcggcttggcagtttctagtgttgggtttatctccgtcagattccctttgaagccggtgattctggtatctgtagcaggtcttcccatattaggaaataacccctgcttagccgtatcgcgacttataagattggattcagcgtcgagtgatggtgaaagagcgaaaatcccgttgaggggggtccatagggatctgccgttgataggcgacccaccatgtaggtcatgcagtgcagtggagcccgcgttttaaggcctccgtgtcaatcgtgtccaccctgccatcatcctactcttcatcaatgtggtcagtgtcaacatcgcaatctaattgttctccaactgcagatttcttccagcccatgagtacaggagccggagccgatatctaagatccgaaagcgccaggtaaagcaaccggagtatttcagctaggccctctctgtggacccggtctagcgctagtgataggtgctttgacccagggtctaccctcaccatatttggcggtgtgatgctggtgctgattttcctatgtttgccggacaccatggcaaagcgcgagcaaaatccgcagatcgaggagcataacaacatcagcatgattttcaaatattcatagccgtctttggcccgttcaaggcgttggccctgccccgctttcacccccgtcatcacctttactatgtgcatcatgaacgtctccatcaaaatcatttccgacaaggctccctaaatcttcaccattatcgaagtaagtcttgtatacatatcactgacaatcgtgtacgccatctctcaatatctggtggttcgctagatcgactatatcatgatccgtgatgcgacccaggcaaatcgctacgatgagagcggcaagctcaagttccactccctggaggggagcctgaaagagaagggctctttattgtcgactttttacacaacctacgagccgataaagacaagaaacccagcttgttagtctggtgtctggttatctatctttgctttgaagaattcccggagaagacttatgcctggcccgatttcgtccgtgtgactattgcgccgaagaaactactgctaaacaacaagcagtgatgtcaaaatggactctcttccaccttccccaaatcctagcggtgcaactgcgaagctgagcaccacagtcccgcctgacgttggtcgattcgcaatgttgatacccattgatataatcgcaaggttggcaatcgatgcagcagctaactcgggctctgagccccatatgaagtttataaaggaatcagtattcaacaaaacgctgataggatacttcgaaactgtccctgactacattgcctgaacaagttgattttggatggaggccaatccttacaacggcggtgtggacattcttctgtgcataaaagagggccaggaaatggactaccatagctcgggggaggatcaggatgccccagcgttggtcttcacgctcgtttcaattagctcaagggagccggcggattcctttcattgctcacaacaaaaggagagaagggggatggatggtgaatggaatggaaagatattcagggcttaccaacgtctaatgcagcccaggaataccacaatcattgaggaatgtgttttcgtttacgatatgagatcttttctgaataagatgatatcgtcgaactaaccaaacatttccgtgaacagtacgaggctcagactctgtctattccaggacgaaatgatgtgcgcttcggggatcggatagtacagcatccgattccgaaaggggattctgacgtgattttcagacaggagaatcagcagcagcaaagcagattttaattctaagtcagaagacacgcagctgctatggaacaagagttggaaataacttcgtgtatctgctctgggttcaatcgttggttgcttattcctactggccatttccatgatatggcacacgtacgtgagtctaaactacacacaacatactcgtgagaagctaaaatcaaccaggtgtaatgctgtctgatttcggatgcgcattcaatgccacatgtgaacagtgatagtgtagacactgtacgatatcccgcacccgatcaggttgacggaaccccatgatggagccgtcggttattgggagtatggtctaatcagattggggctgcttctgcagatattgattgggtctctctgggaagcagggaattaaacgggaggataaattgacatgatcgaattttgacatggtctctctggtcgttccaatatatatttccattaatgactgcaccgaagcttccatcgcacatcgatggcctgataattgcgtcaaggagaccagaatatgaggggaattcgactccatcgcacgctctcctcactgggaaaacggcctacatatactccatataaagacttggctataccaattttaagaaaacaagcctcatttacatctcacgatcgaagatcaaaaccatcgcaaagcctaaatatacgtagcacacacataagcggtaaaattatttctcgaaataaccacagcgcaacaccgcaacaccgcaagcccgcaatgaacaacaattaatgtgttattgtagaagcctcatccacaccaagactctgcactccacactccaccggcgatctacaagattgtattcgcgtaaagtgtaacagcccagtctactgcaatggtcagtgcccgaaatcaaaaaccaataatgcgctcatcactcttccaaagttggtaacacacccacctttattttgtatccaccactgtgtgtcggtgttggagcgggaaagaagcgggagagggactccgttggaccatttgtccgatatggcaatgatactcggttttagtgggggctgcgacttgggtaagctggtaaactggggctttcagggggctgtttccactgataatatagttttttttttcttctttcttttctgtgggtgatcctttttgggtgatctttagagtggcaacatggatttaactatggagtttgtatggagtaactataatatgcggaataacacataacgaatgttggtgcgctgtagctgcatatgtaggggagagttggaatggcaagataaagtactgtggactcggtgcatattgcagagtacatattgtaggcggcctgagtataaatatacatatacgctgtacgttgtacgctgaagatgtagacttgtatgtggggatacatacggaagcactgtatatcacatctgtgtcggcatgcagacccggttgtggaagataaaattgcagtgatggatggagaacgcggtgaagacagcaaagcgggtatatcacggagtcgaatcggaggtcggagtgcatgtgtgataggcaagattctgatgtctcaaaactcttgacgcgagcgcgggcaattacatttcttcattgggactagtttattaaactattatggagagggcaggagatgcttccagagcttgagcccctccaattttgtaaagcatgggaaaaggtagaattacaagtggctgtgttctaccaaggccctcaaagcgcctctaatctttaatctcatgtacaatatcgcttacggtaaattggcaatgtggtctacgacacatgataatgccgagaatcgaggctaggattataaccagtgatatgattgtgctccccgatatagccctagacatggtgtgccatctcactgcagttgcatatacccctgctatcagctgcaccgaacttcttctggcgacaggtatgtagaaggtcatgtcgactgttggacaattgtaaatagtaacacatagcatacggagtactccgtagtaaatagtcagttggagctacgtagtatacgaggggcagcccctcaggatcagcccctgcatgagtacggagtataggagaacggagtacggagtatggatccccaagtcattgattttgattttcctttgtttggaacaagatcagcgcactaaggagatcagcagctgagttatgaaaaaagggcgagtgcatagaccaagaatgtggaacctgggttctccgtactccatacccaggagaaacagaaaaagagcgttaaattggtaaatttgccggtgggatttgggaaggttttggagtaatccaggcggaggaatgcgattggcccaacctctcgacggagaaccacgttggcttgacctggccgaacctgggcttgaccgctaggcgccgttggttcctccatcaccagatgtgttcaccagtcataagttggacttcagataaggaatgtctccccctgctgcacctggaccttgcgtggcgtcagaaaccaacatatccgaggatggccgcctgcatttatggattgcgcccgatacatatcttttgactttccaatctgattgttgagtcaaagagtcgatgacgaagaataaccgtgaggctgcatcgtgcatcgtgcattagaccttacgtgtctgatagatgttgtgtcaccggaccctggtcaggtctagactggaattgaaagcactgttggaaatcgccctctgaagcaccgcacgaccagctgattccattgcagcctatcgggaaacggcagctctaagtttcaaccttgacgacatttgggtcatagtgtcggaggataatcccaacgatccgtcgagtcctagggccccgccaattagtgctgaccattggatttggggattgcgaccgaggtgaaattctttttctttgtacctccttagatccttcatatccctgtttaatccttgttaattcctgttaatccctgaatcccatcacatttcacatatcagaacaagaacaaaggagaacgcacggggaccagggtgacccggacgtttgcatccgatgctacaccgtaaggagctgatgacatggcgctaaagcaagccaaattgacctggcccgcagctcccgctgcattctttggagctaagaaggggaaccgagcaatcataacccccgagttggaacgtctggaaggatgaaggaagctgggatcggctccgccctcctgtgccccaatagtggaggggtggattcctgggcggtgaaatgggaagttcatcactctgtctagtggatatagaatacgcgccctttcggaagttactgtccttaggccccgttatggacgtattaggcctagttgcactataggaaagtcgatgatatgaggacaaaacatggtactgggccgtctcggatcttgcctggacatgcagggtttggagaatctcgtatttacgactttgtaaaggtacaggctgagtcctgatccctgatatgcctctttgtatgttcaaaggggggtgatcagaccagcattaaagaaatcccaatgtgccgctgttacggtgtgctcagtgcataccatagaggatcggcattttttctcatattgtgtcagcggttccactagaggagaactttgattaagacaaatcagacacatctgcctccaattattcctttgctttctttccttttccgttcccttttttaatgggagtgggtcgaaggtgtatgccgcgtgatgggcttgatgtgttttgcatcgagatcggctcttatttgtatattgtatattaccggatcttattgagctgatttataacatgtgtgttcctctcagaaatcgcaatttaaattgctatctccaaactatatcctgcaatatacttaaattaaagaaaaatagaaaacgccccctgaccagacacccgggcttggaccgggtattgatctgtttttggctttggcagagccctaagcacgatcagatccacctggccacgttgtgaatggctccaactactcctttttctgacacaaactggctttttaacttttctaaaatgctggcttcattcattttacttccacgttagttcacgatgccaagttctaggaattggcgcccatccgagactggacctgcaactgtctgttctacctgccatcccatcttcggaccttggaaactgcaggtgacatgaatgatatgaagactgatcacattctaagtatacatcacgtcactgttggaacacaatcccaactcaaaagtcaagctcaacggggttcaaccgcttgggatagccgagcttcccgctcagagcccaatttgttactaggccgtttttctagattgtctagcaggtacgtatgtacggaagacatatgtactttggtggcgcctgtgatagttttctgtgccacgctcccgatgaaacaggcccacaagcgttgaggaaatcgtccctacactacggatactccgtctgtattaactatattttagttgccccctcttttttttttctcaggtgatactagagagtgacctcaaaatgttgattcggtaaaaatgcaggtagcctaaacctcgcatggtccaagtttccgttttcaattcagccaagccgacctaagtgattggctgtgacctgatgaaagcgcgtcgagtagtctatttccaggctcggaacatttaaatgagaaaagtcaaaaaaagagtcagaagtatccgtaaatgattaacgaatatggtggcaatgatgcatctcctgcatcatgtactccgtagcccgggtagtaagggaagtcagcccatgcagagaaaatagcaacctcgcattcgggtatgcacggtccaaagagagaaacgacggttttgttctttaatctagactttgggaagggcgatgacgataattatctttaactccactttacacccctgtcgaaattcaaaatggcagtgcgtagatctctagcccatcacattgtaacccttgcgtaacgagcccggcaacgctatactggggagaaggagaacaagggaaggaaaggaggacaaggtgtcctgtagatgacttctcatctcgcattcttacaatcagcaagaaagagaaaccgactcagccttgggggaagtattgaccgcagatcgggccggatcgcgggtcaaccattcccagcggctaaagggtcaaggttccctgggaatttgggaatttggattttggatttctgcaatttgctttttcttacacgaaaagggaaaagaaaggaaaaacctcggaaacttaagaaaacgggagcgtctaggctgtgtgagattacttttagcataagataccgtaactatccccactatacacattatacactatattatacctgctctacctagtattcctgcctatcataccgaattataccctattcccccctcttactaggcctctttagcacttaatctatttaatctattccattcttccccatgttcgccgcaaaaagcatgttccatgttcccacaggtccgatcccacccccacttagctattgctgcactccggagtattccctatgggccctggtcgaaacggtggaactgccctgattcatggattcggttccaggttgcccttttgttcctttctgtctaggctcctttcgttagtgtcaacgtcgtgtcatcttagcatgtgcggtggcatcgtagatccgctacggctccctggattcccttataagcctaccttgcctagtaacgggatctgatcttcagaattaaatactctcacccgttcctgaacggagcatcggctctttctctttatcacatccactctccattcaactgcaccccacactacgtaagctatttgctgtctaccacagtgactatatactgacttgatccccctttagtcaacttcctctcttcaagcctttacttctttccagttttttatatggccgattattcctggcaacctcagcctccttcagctggctctcaatggcttccagacgatgcttcatatagccagtccaccatgcaagatctaacttgtgctttccctcgaccgaggcacactcgcgtcatgaagcctcgtagtgcaggcaacagcccttccacagcaaccaggagacgatcaacggtgaatcaaaatgtgatgcatggcctgcccactcaatatcagtcatccctggaagaagcccttctcgcctcagccgcccggaactcacgtccgatgagctggcatccttcatcggcaagaactcgcggcctttccaacccgtacatctcagatttcccttcggatagctatgccggtatggcagccgtgccggatcagtacctcaactcagccgtctacggtggtgaaaacatcatgtcatatcccatggccgacccttcattctcccccgactacttccctgtctacccaacaatgcaggaggatttcccacttccacagcaaacgccggctctcatggccggctcacagattgaccccacaatcggatgggatgtcgccaccatgtccgatatgtcaacgatgccacatctaggctccgataactggagcctggacatgctatcaatgggcaccaacatccccccgccagagacaacctgtccaagctacgtcagcgtcccttccccaggtgaactgagtggcccatcaacaccggactttctcccaatgcaccaattcgacaatcccttccagatcaccgacgagcccaagaagaccggaaagaacgaagaagaactggtcggcatgggcctctacagccagcccaacgggacactggcacgagccccgcagagtaaatcaggcgagggcctcaagctcgaagaaacattcaccccgtccgacgaagacaaggacagcgagacggacgcagaggtcgagatcattggacaccgcgaattgccacagcaaccgcccgcctaccatgaatacgcgtctaccattcgccagtcgaacttttcttccaagcagcccagacaagctctgaacctgctccagaggtcgttcttcttcgaccacgataatacggatcaacagtcgatgactgctgtgcagccttttgttggttttaatcagccctgcatgaattatgggtacgggtggatctaaggggatcctagcggagaaatttttttttctttcttttttttcggcatttctttactgtaccagcggcatagcgtggagtcatctttcatcatcttttttttctcggagtcggatacacggaaaggataccctgggacgagacttgcactagctacaattactttaggtgtactcgtacacaattcgatactgaattcacatcaatatttgctaccactcttcctatttttagtcttgcttaaaaagtactagtagtgttaatcattgtcatcatttcaagttctcgaagtatacaaactcaccctctgattggccgcggagaagataaacctcggcaaaaccatcccaaaggaacaacaattccccgaaaatatttcacaggctatcaacgcaaaaagtcaagcaagctaaagcttacgcatccggagtcgaatttaatttctaatttctcatttcgaacccagcgccgaaaatggcaaaggtcattttcacagcttggaaaaccaagtctcagttgttggaagtgcgggatgagttttatcctccgtctgcgtacgctggaccggatttgcgttcccatggctgtgcagtggtatgttacatatatgcataggcgccagaatgagtgcgatgtccgctttgtatgtggttgctaatgatgtccggaatcaaaggtcgaggcttggaagctacgcggcaatgtaccgcaccatgttgaagctacggcgttgttgacagatgctattctgcatgatgatgcacagaggaattccatcttctcgattcgtgctacgtattctgcagctttctgtcggtgagtattgagccgtgcctgattcttgtttttaccttttatgagagagaaaacccagtccgattcccttgggatgatgtcttgaattcagactcctctttcacatacatatatcccgttttcaaataactaacgctccaactcagcttcgtaactggtcttgtggataccaagatccacggcgttcgccgaacaatgttccagcgcgccactgacctaggcctcccagcctccttcgtggaactccgccatgaagcaacccaccgcgagccaccgtcgctcgtcgtactgcgcaaagctgcgcagcgctcgctcgagtggctgtgggacaattactgggccggtgttggtgacgactccggtgcgcctgcattgacccatgaagatggtgcgtctgtcagggccgtcttgtgtgacgctctgcagcctctatccagcggatcggtggatcctgtgtccaagaagcggaaacgggatcaggctatttcggtagctatgcggcttgtctcggtttgtaatgtttcggcgactggggtcaggcatttgccttctgttttgcttgagcggggtttcttgatccctagaggtcgggagtgagtttgatccccccctgtttttgcttttgtctcggctgtgtgtcttcaggggtgcatatgttgtcggggagtacatgctgactgtgacattctagactcggggattcgatgaatgatacattcaaggaatggaacccggttctgcaaaaggtcgcagagattcatcctgcgttcttgagacatttgacggaagatctggtgaatgatctagcctttaaaaacacaaccgatatatcggaagatgcgccttccgaggcactgtatctgtggatcgcgcatatcttgacatctcctgcctgggagttccacaggcaatcatgcccgcagagctatgttctccgagcctgcgatgaaagtccacaccactggacaaatatgttgggagatcagttaagaaagcagactggcaagtccaagtcagttcttaccgctagacccgccaagaatcggatttcaaaacccaaacatgttagaaatgactcgcaatacgctccatcccagctctcggataagctgctggaacatggatggggattcctggagaaatgggacagtcgacctttgggtgtggtatcgagtaattagacgggctttctccaattcactcaatgtatacgctgctggcagcgttagagaaccccaaagccaatatttcccgtacaagatagctcactagtacggagcacggagtaaccaatcaaaagcggtggcattactaaagctgtgaagctatatgggaaaatagttcttccggatgacgttggtaatccgagatccacccggtcatgtatctctttcaagagctccccgcactattttgattcatcgttggtgatgaactttctaaggacacaactatttggaaccaggtcgcctctctttaggtcacaagccagagccatgcatatccaatcaattcctatgtgtatgttgatcttccggtccgtcatatatattaccaatcaacagtggctacttggtagtaatattgcaggaggaatgattgcttattctggattaattttacagggacggggaaaggtaacaactatgcctacctcgtgacggacgaggcgaccaagcagtcggtcattattgatcccgccaatcctccagagtgagttgcatctctataacgggttgaaactacatgagctgaactgattatgtggaactacagggttgcgccagagctcaagtctcaaattgcttctggcaagattgacctgacggccattgttaatactcatcagtatgtgatagaactttcatgggctggtaaaaagaggataaaatccaggtttgctgacatttgctgaagccactgggatcatgctggcggtaacgatgaaattgtatgcatgctttctcgggtcactggttgctatctcgggctaacattcgcaccagttgaaacaattcaagggccttcaagtcattggtggcagagactgcgcgttcgtcaccaagattcccgcgcacggcgaagaattcaagatcggagatcgcatcttagtgaaggcattgcatactccctgtcatacgcaagacagcgtctgctactatatgcaagatggagaccagcgtgttgttttcacgggcgatactctgttcattggcggtatgtgtatcattttcaataattttctgtcgagtgtcatggactaattggaaaccaggatgtggtcggttctttgaaggaaatgcgaaggagatgcacaaggccttgaacgagactctcgcggctctgcctgatgacaccaaggtttatgtagggttgccttttcgtgttgatacaagtctcatactgattcctcctagcccggtcatgagtatacaaaggccaatgtcaagttctgcattgcagtgtcgcagagcgagcctatcaagaagctccaggcatttgcggaccagaacacgcagacacaagggaaattcactatcggcgacgaaaaggtaagagctgaacctaagcgatattctagtcgagactgacaaaaatttagcttcacaatgtgttcatgcgtgtcaatgtaagtttcttatcttttgcccttgtataagccgttgctaattcaaacaacaggaccccgagatccaaaaggcaactggcaagactgatcctgtggaggtgatggcagcattgagagagatgaagaattcgatgtaaagatgatagtaaactagcgagaaaatctacgagatcatatgttgcgatatacttccgtagaaagcgtgagaatgaggtattccgaggcaagccggaactatgcaatccatgactacagacgaaatctccacaaatcaggtcatcaagagatttgtataactccgtagatactccggaaaatgagtgggactgtatacgtcataatcgtgccaagctcccggtccccaaatgtagacataactttcttatctcacgaacgtagccagagaagatgcagggagatgtatgcagtgaaaaataagtcgaatttagtgatctcagtcttccttgagctagtggataaaatttgagcttatgtagatgtagcttttctatagacaagccatagaaaagatacctcatccctgttttgtctgcggcccaccaataccgggagggtggggtataccaccagctatctacctactttctttcatgccacaaacacccttgacatgacacagtgacaaacagaaaattccaggacttctgcaaaacgaacaaggcagctatggatgatgtaagtgctggtggatcggagtgttgcagtgactgaccaatgccatcatagaacgatggaggggcgagtgataccgaagctcagaatcatttggaggtaagcgatttgactcccatcatagtaccatactaagtgcatatcgtcatacaggtcgtgttctatccggactgcagtcaccgtcgcaaatcctcccttgttatgatggacaagccgagggtccgatctcacccagctcaggatgacctgacgaccgcctgctatgttcactccctcattgcgagcgaatggacctcaccaccacaccacctgaaacatacagaagatgcgcaagatctggaagatataacacggacagtggacgaggctcaacccgtgacaaataccaaaggtttcgagccagatgacccggtcccggtgctcgatacggacgagaaagcgatacctacaattctcgaatcccggcatcttacgaaaagacagctatcagatatggcttggaatgtgcgaaagctatccaagaagctgggcagcatcaagctcaggctcaccgtgaaaactgtcttcgtggtcagcaaggcgaaggacgagtcgctggtaagcctgactcgaaagcttacaagatggctactttccaaggaccgcgactccgcgtacgtggtttacgtcgagcggcggctcgagacgcatccggacttcggtgcgttgcaactgatagaagacgagccctccgccgaaggccggctcaggtactgggaccctcagctcgtgcatgacaagccgcatttgtttgattttgtgatcacgctcggtggggatggaaccgtcctatacacgagttggctgtttcaacgcatcgtaccgcccgtactctcctttgcgttgggctcactaggcttcatgaccaatttcgactttgcggattaccagaagagcctcaataatgctttccgggatggcgttttcgtcagcctacggctacggttcgagtgcaccatcatgcgcagcaaagcgcgactaaacgacccacacgggccctctctatcaaaacgtgacctggtagaggagctgatcggggaggaaggggaggatacattgacgcataccccagatcgagtgcatgagattctcaacgacgtagtccttgaccggggaccaaacccaagtatgccttctcctacagtgctatgtgttaggtttcacaacagaaacagacacagctaaccaatctttgctagccatgtctcaaatcgaaatatttggtgacgacgaacatttcaccaccctgcttgctgacggaatgtgcattgctaccccgaccggatcgactgcttacaacctcgccgctggtggctctctttcgcaccctgataaccctgtcatcctcgttaccgctatctgcgcccacacgctatcattccgacctattatcctaccagataccattgtcttgcgcatgggtgtgccgtacgatgcgcgtacgagctcatgggctggctttgatggacgagacaggtgagtttgttctatatgcccttagtttggcacttgggtctgcatctgactgacacaccccagggttgagttacatcccggtgactatcttaccgtatcagcctcgagatatccctttgccaatgtcttacctcccggtgggcagggtgagggctgggtgcatagcatctccaagacgttgaactggaattctcgacaaaagcagaagagcttcaagtagctgaagaggaggacatgcttctttggcctgaccctggctctttcttcctcttcacctcttcttttatgagcgtatttggtgcctgtttagttcgatcacttgtattacagctggtggttcattgttgggcgtacatgctttctagtagaatctatgaaaaacgatatgactggggtgatggagtactagttgttagaaaataagaccaacaagatttttaattcttttagctaataattagctacaattcccagccatttgtttttttctttttttccaagtggacacttttttttttcgactaagaagctgcaggtccacttggccctataaaaaggccatcgcccggcccgaaaattcttctttcttcatcttcctcaaccacctcgctttcagagtcttaatgctggtcttgaactgcgatcttgagcccgacactttcagagtatatgtgaatagaataacatatactctacttgactgacttggtaagtttgcaacttcctttttttcttcctgcactgcattcccccagccaacggccttgcgccgttcgatgatgaaaatcttcctacattcgcagtttccacgctagccgtcgcttgaacccaatcaaggcggcattgagcggaatatcttccttggatgtctgagaactatttggctgttctttttatgaattctttgcatttcaactttgcagtcgagacggttgctaattgtctctcagaaacaggattccttcttggtcaaatctttctatcatcgacatcatacatcgctttgcagtgtgcagtctctagctctgcagctagtctctggacgcggaggtcactgctttgcgcaaatcggcataggatatttggagtgatgtgctgtgtcgagttgaagtcatagcaagaacattcagtatattagtatcaaatgaatggctgtttctacaaatatctcccaattcagatctttttctagtatctcatagccaaacctgtagtttctcagcccagaagtaaaatcttgcaagattgcacccgaaagggttgtgctccgccgtactgtatccacctatcgaccccatacgacctcaaaacctcccataaataactcaacttcaccagatcctcaagctctcaaatccgtattcctcgcctctcaatcaaattgcaacgccattcccatggcagcaccacatcgacatgccacgatgcaatcaatgagcaatggcggcatatcgtcaggtagcgacagaccacagcagcactcacaactatcacaacagtcccctgggctgcgtgtaccttcgaatcgcaagaccatctacgaccgacacctgaaccggactcgtactgcagaactcagtcgggcgagcttcgcctttctattcggggagatggtcacatatgctcaacgacgagtaacaggtatccaagatctggagaaacggtaagagacaaccccctaatccaatgcaatctcctccccagcctaaaacaaatattgccatgtactacccaacaccccatagctaacgacccctcttcccagattaaatgaacaaggctaccccctcggtctccgcctccttgacctcctcttctaccgctcaacctcaacttcctcctccgccctctcaagctcctctacctcctcttcacccccaaaccgacccctccgcatcataaccctgctgcacctgatccacggccccctctggcgcctcctcttcggccgcgccgcagatgccctcgagcactccgtgtccccggacactcccaacgaatacatgatcaccgataacgacccaatggtcaacacatatgtcagcgcgccccgcgatatgagcatgctcaactgcgctgcctatgttgccggcatcatcgagggtgtctgtgacgggtgtggcttcgagacgaaggtctcggcgcataaccagcccacggaactgtggcctagtcggacagtgttcttggttcgctttggggatccggttatggagagggagaaggtgcttgagagggcgggtgtcaaataattcatgggcttgcattcggattaccgggatatatagaaggctacaggctgatcatgtatgcttgttagcatggtagatctacggcgttttgagatgctcgagggtggttatggcgctcttagtctgcggctctttggtaatgtttgattccggcaccggcattcccttcacgaagtcatgcaagtaccagtttcgacggtcgatctgagggatttcttaccggttcttgaaatctgctgtgaagaacaatcatgtacaaaagtccttctcggccagaagatatcatacaatacaattcctccaggagaggacatgttacattacgtacatgtacatacatagaagggtattggcacattggttgctcgaaatgagatgtagaagcagatcccaccatacacattgtgatggactggcgccgtaactccaacctccaagcaggatatcaacatcgtccgttcaccagtctgaatcatcaagaactgtccactcgccgacgtttctcccgatcatcatagggcgatgggctccgcttccgcctctccctagaccggctccgctcgaaccgactcgaatctctatcatcacgtcgctcccgtcgaggcgaacgcgacctcgacctgcgccggggtctaacaacgctagcattagcacccgtcggcccgcgatccccatcatcaccaccgcgacgatcaggcataaaccgctcatccgtaacaccctcagggggcccatccctcctcctcctgttctccaacccatccccaaaccgcccagtatcctcagacttgagatccttatagcgcgtgcggcccttctttccaagcttcgtcatgtcgcgcacctgcatgtactgcggcaacgtatcacgattgacatcatcctcgaagcgcgcgcccataagctcccgccgatccagaccctccgcctcaagatccccacggaagaaagcacccttgtggaaatagcgctgcatgaagcccgtctggccgcgcgtagcatcgcggtcctccttctgcttcgcgatgaactcgctgtcttcgcgctcgcgctcctcggtggtgaggttccgccggcgctcaatctcttcgcgctctttctcgctcgcttcgatcgcttcccgggatcgctgcacgcgcttcagctcgcggagtgtccacgccgcgcgctcagcttccgggtccaggccgtccgtgtcgtcaatggcttcttcgtcttcggcttcgacgagctcgtcgtcgtcccaggcgcggttcgcgcttgagcgcgctatcgcttctttctccagttgatcgcggattaattggtctgctttttcttggcgttgtgcggcgcgttggctttcggcttctgctgctcgttctgcgtctgcttgtgctttcgtctggccggctgataagggtgcggtgttgcgcttatcttttttgatgaatgttggccggatgagcatgcggcgaggtgcttcgtcttcggaactactctcttcttcggagctttcttcctcttcctcttcttcttcctcttcatcgctctccggggtagttttggacacagtaggttttacatcgtcagtcgtaggttgtggtactgcttttggtgcaggcttgggctggtcgtcctcttcttcttcggtgacgaacccttcctcgtcgtcctcttcctcggccttttgggctgctactgcacaggctgggaatgagctcgctttaggcgctttcgctcggcgtagtgcctcagctcgtctgcgacgctcttgttctcgtcgctcctcccgctcagcttcatcatcctcttcctcttcttcctcctcagatgagggctcctctgcgacagcctttccaggacggtagcgagtaggcttaacggggtttttggtcattccccggtgggaagatgggaatggaggaggcattgtgatctgatctgatatgtggaaggagggtggatgttgattattattgagatgtagagccccgtttcctagcttgcaatttaacaccagaaaattgcgccaggtttgctccgtaatatggtgtggaggtgatttgttgaactgacgttatcgaggccgaagcttttgctggatatatgtgaccacgtgatgatctgcaggagggcagaagtaggcattcactacattaactcggagattgggttcttatatctgggtagtctttctttctctccgctcaatctagagccaaataacccattaagcctacgtccacgtagtattttcagatatccatctcaaaaagtccaattagccagtttcatactaatttaatcaccacgtgaccacgcgtttccgcgcctcgcgtcgatcagccttacttattccccgccgttttccaacatcaacccgggcaacgaaaaatatcacgctcaacactctcaaattcgaagtctcaaccagagtggaaagcagccaatattcgaaaatgtcactccaaaccccccgcatccttccctctcacctccacgcctttcacccttccagcactagctcgaacaccgttcgcatactcggcaccgtcaccgcgctgcacggtaacacggggacgctcacctgcggaaccaatggtgatgtcacgctgatcttgaagtctgatgcgcgcctgcaagtgggaaagctggttgagattgtggggaaggtggctgatctagagggtggacaggtatgttccacactggctccggagggatatacttaatatctttgattcgggcttctatagctatgtagagtggatgctaatgctttgggtcttgtagggatacggaatccgtgtactgggctcgacggagtggggtgacccagctgattgcggtatgttgtcgaatgcctccctctgcgaggtaatttgggctagagactgacttgtgtgtttgtcatgaatctagattataagatttacgagaatgttgtcaatgcgacacataagttcaagagtatcttctacgactaatgggtcatgagttgatggacttgaatacatggccgtttttctgaggggtttgtcccgggtgtggtataaggctggaatataccaagagcacaagccagcctaattgttgtgacattgtcagtgccctccattagagcctagggagcagatatctgtttgaccgggcccgggatgtcgatgctgtcactgtgattctccctctgtgattccccggcttttgcattttacgtatgagattatgatcaaagcttctcccaataaaaattctacattgagctttacttataagaattgagggtggttggaatgtagttggtgctgtgactgcctaggtggctagccgtacaagtcttcggctacggagatttacacccctcatgtattccgtgggactcgtcaagtggcaagtttgaaaggtatcatgtcgtgttgggaccatctgcgaggacctcttgaaactgctatattggattcagaagaatctatcgccttaaggtgagatctctgaatggatgcattaatatctccctagagatgtctactttatatccaggcacacacagcttattactctagcctaggtaaacaactcaaagccacgcgtcttcggctacggagatttacacccctcatgtattccgtgggacttgtcaagtggcaatgagagccacgacttcaggaacgtccacgagaaagcccagtttgttgtttgatgcagacctacatggacctcatacatatggtaatgttatggtccctgtggtaggtgaagcagcatgtgctacgggtccctctgcctacactgtctcatggtgctacggtgagatggtggtcagagggatgagaggaggaagagagaagaagaggagaagaggagaaagtgtagggggagctcttttatattgtcacatcccacgtgcctgcctaaaatcgacggccctttgctcttgccattgttccctctcggttattggttgtcgcaggtgactatacggaaccctaggttacatatagacactgggttgctcttgccttctttacctctcgggcagggtcactggattcaaccggtgcctaggtaaatcattttgttaaagcaatctacctacaaggcagggcatgattattgtgatttgatttgatttgattccgtacttcgtactatcataagagctacataaaaagggtatccctgacaaagaccaccacttccacccaccaggcacagcgaatacagcatcggagtcctgtcaagatactccaggtcatcagtttgaacaaataagaaaaggtcataagtctcaaggtgcaagtcaggaaccgttggctgtatgcaacgagatctacccataaaccgaacgccatcgctaaaagacaacaaaaaaacaaataaaagaataaaaaagtaaacatgatcgggttgatatgtggcaaaacattcataaagttactcccggtctaagacaaagaaggtggctattgcccttcggtgtctgcaccagcgggctggctcttgggtgcgtcggtggtagcgagagcatccgaactgaagaaccccgagtcgggaacgataacatcgttgaagttgaagggaaggagatcggggttgaagttgtctttctcgttgtggtggtccgagaatagagcgttgagcagctcgttggcaggagtttcgcaagatccagcaggggaggcgtagtccgttggaagccactccgcccagttgtcaccagcgaatttggtgttctccagttcgaagaaagcttcggccttggcagcatcatcgaaaatgtcgagaaccatgccatcaaggggctcaaaggtctccggaagactgtcgtttgcaagctgtggtgccaaaggctgttgcttggccggggacttctgttgccgtggaggtgactgaggacttccgtgaagtgattggatacgctgcaggcgctctgccgacagtcgcgctggagacataatggagcctagatccttacgtttgttgaggctaggggagtttgcgggcaaagacaaacgcttgtcaatcgcgttgatccgcgggttccgtcgacggggagtagggcttgctgaatcgaatccgatggagggactttcaaatagatcatcgaggccatcacttggggtgggtgcaaggttctccttctgctgattcggcttgtcatcctttgtggaggcaatgcgagggctgcgacgtggagagcagctgttcaccatagaagaatcaagctccttcaaagggccttcattctgaggattattgaaaagtgaccttctcaaaggcttgggggtgagactgttggcatctgtcactggagcagagcgggcgtgcatacggctcattgggctagacttgatggcgcgtgacaatacctctctagcgtcctccttggaccaacggcgtcctggggtatcaaacggcacttctaactcaggatcaggactaatagatcgagaagactcgttgggagaataatctgcctcaccgtcctgatcatcgtcgtcgtcattttccatgtggggggtctccccatcgggatggatggaagacgcttcagtaggtgctggggaggaagcggaagacttctttggtgcggccttgctccgagttctggcagcagggcaggacttggcctggccgtctgcgcggttcctcgaaggacgctttttgttgttctttttggtggccggcttcgctgcccctggcttggtccatttgtcttccgggcgcatttgtttgaatttgtggagccacaaaccacaaggattgcagaaagtcatctgatcccaatcattatcgtcctgctcgagagcctttttgtaaattttgaagcttttcacttcacccttgtcgtttcggtccacgggatcccaatagagcatgggagaagacctcatcatatcctccgcaagactctctccgccattcaccgttttcacccaggctcgccgccagctggcggtttcgatggagccgcaattctcgcaatagggcggaatcagcccgttgagaatcgcattgtccaagcgtgcctttatattctttggcaccgccttagtcacctgcttcggcattgactttggcttcgaggattgtttcgactgcttgggattagaaccagctgtctcacacggcatgaaagtgacatccacaggcccagtaggccgaggaggaacaatggggtcactagccgggattgcacgaaacatttggggaacttcgtggaagatatgtggtgccggcgcgagtggttttagcgccaagcgttgtccaccagaactcgaagaaggcctcgatgcggggcgggactgagcggggcgagaagggggagcacgagataccgaacgcggtgcttgctttgcaatctgctccgttgagttatcatcgacggggagatgatccttattggtcccttgtgcggcactgacaatgctgactggagagcatggctgcacagtagaacggacagagcacttgtctcgagttatcccacgagacacttccgttctaggatcgcctaggggaataaccgagtcatcgtctatggtctcgtccggccctgcgctcatgaagccggagtcgttctccagagacatggtaggcaacacagggcttgatctatttggtaaccggctatcgaacactggaggagatgatggaatgttggaggatggctcgaagagaccttggtaacgagtatcctcgggagaggggccgccagcgtctgtggtagggatgtcatcgctcatgcagtacggagaactgtacgaagcgggacatgaggcaatgctaatgctcgacgactcccgcaacaagctagccgtgggtcggcttcggcgggggaaatcagacggccgagatatgggggtgggtggacggacgggctcttcgtgtgaatggtcgacggtgagagcggggtttacaggagttgggcggtggattcgtacagaggccgccgtgctggctgcaactcgaagcgaacttggctgtctttcgatgttcatacccgactttccgggccagcttgcttgatacaccttggccctcttccgggcgggggcctccgttgattcctcatcagcactgccgtaccctgactgaatggaccctcttcgggtgttgttttgtgagacgtgtgaaagctgggtctggttgtcgcagtctcgcatggaggcacttgaggatgggcgaatcatatcgctatggggaatgctctgcttggggtaggattgctgatgagctggtgttcgacatccaccaggtgttgacacccgactgccagcgtatgagtgtgaaggcgacaccgagcggaccgatccattgtggtggaatgtagcgaactctcgtggtgtggagccttcgctcaagagctggtggaatctctcaatcccagattgatggatcggggatccgatgttgtcgttctggctctggcttcttgaggattccaggagggcggggttttggcgaataaaatttgtccatgattgcgtgtcaaagtcgcctgaattgccattggtcaacttccgatgcttctgcatgctggctaagtactcactctgggtgacagttgggacaggcaccagccgtagcttgacctccaacgtctcttgggcacctttggagaagagaccactgagggggctcttgcaaactcggccagtaattatggtcttcgactggttgttgggtgtctcagtcgccgatgagaaggtggccagcaccccagaaagcatgccttgcccgacaagaggggtttcgaattcggaatagtcgtaggcatagacggtataatcctttcctaattgacccacaagctccgggctgaacgaggaactgtgtaagtatgccattttggtcatccggggaagaggaagtcaaacctagcagaaacgattgcctggatgcatatttttaactcgatcactccaaccggagtgttctcgtctagaaatgccgtttggatgtcaagcacgtgtggccaccgagcaaggcaattagttttattctcgttgtcgaatgtgtaaagaactttcactgtatgatgaccatgtttagctgccattcatcgccctcattatatcggtaatggaaaacatacgcctcatagggcggacatcgataccgtcctgagattccatctcatcagcctttgtctgtccaccatgcaagacggtggatcaaattctggggttgaaatgaatggtagaggctgaagggtattcaagtatggtcgaagtaagagactcgaggttcgaagatgttgacaggtagaaagaggggggagcggagcgaaattgtcgatcaaagaaagaaagccctttcactcaggatcgggaatgagtcggcaattattagcgagccagccgatcagcggtgcatatctaggatctcgtcgaccgggagaatggcaggttatgcaggagtatgtagtggcggggtctttttatctgcaggcctggaattttagcaattgtgaatcccctcgcagagggaacataggcatggaaaagcaaaaagcaattcttaccaattaaacagggaaaaaagagcaataatctctccactagctctgcatgagcagacaaaagtggaagagagacgagtgaggaaggggtgaggttaaggagccttgcatgcgcgggtcaagctatcacgaaagatctccaaacaagcgtgacgcgacgtgactgcggccaatcgcgacctcgggaaatggccggaagttggtgcctaaggcctgaggcgcctaatattttcctcaggcgcttgtgagaagcttcacgtgacctctgctctccgccaaccatcaagatgtctgaacctacagcatcttctgaatcgactgcatcttctgcatctcctgcatctcctgcatcaaccgcaccttctgattcaactgcatctcttgataccagcaatctttctgagcccaccatgtcgactgctcctgaagtccagattcagtatgcttccctatcaataactcttagctccattcagaaccaatcatctaacaagccgactagggaccttctgaacaagccgagaagcgagctcacgtaagtccactctttacaattgatttatccccttcccttcctatgcgacctttctcatcctgagttatcaatggtctcttgatcgggagtttctgattctcgagcttgtggggttcgcctacgacgcccgcgtctcggaaactttgcgaccgacttcttcacatcctcatgcaagctgcgcaaagtacatacagcacataaaactaactttacatcttgcattttaatagtgaatatgaggtctctctcgtcgagtcgcatgagctcagcgccggccccctgtcgctcctgctgaccgccacgcgcacccacacccaggtcctgatctcctgccgcaacaaccgcaagctgctggcgcgtgtcaaggcttttgatcgccacttcaacatggttctcgagaacgtcaaggagatgtggaccgagtaccccaagggtgtcaagggcaagggcgtgaacaaggaccgcttcatcagcaagatgtacgtgaaccaaccgtggacggatcttcgtccctctttgctatccttgaaacagtttctaaccttattgccttatctttaggttccttcgtggcgactccgtcatcctggtcctgctcagctaaacgcctaatgcctcacgttgacatgatccctgctacttgcacggcatctcgaacccatgaacattttccatgggcaagttatcatgtaatcgatctcgataccctttgttctttcttttttccctcgcgtgcttttcctcccttgcttctagtccccgccaagacacgattggctaaggggatggactaaaaagacctttcggcgttaagttctttgcacgggctcctacccgttgcttttttttcaaagggaatcctcgggcggcgtcaaattagggcagagctggttagcaatgaatcttacagaaagatcttatggatactacctttgtagatgcttgtaagctagtaggtcaccttcatccatagatagatcttgctttttgtacttcctcgagctcgtcagagatgtctcatcccttggacattattaagggttggattgttataccttattcttcgccatgtacaactacaagcactcaatgtatcaaccaaataagaatatcattatcatcaatgaccatatctatcaagagacaatcatgaacagagagaactcggggccggatatgccgctatgtatacgaagaaaccacctagagaaccaaatcctaaacagcctcagcaagccccgtcaaaaactgcgacaacccaaaagcgccaggatccggaatcttcccaagccactcctcctccccaccaacataaacactcctcccaagactcgccttcatatccttcgtagactcagtcccctgccgcgccgcctccgcagcaaccctcacatccccactctcaagcaacgaatccacaaacggcgatagcgcatcaataagcgtccgatcaccaggcttagcaggcgtgtatttccccagtgccgcaaacgaagacttcagcgccttcgcccacgtctccgtcgtgatcgccgtcggcgaggtggtgttctgcgccagtaagctgtgtgcgagcgcgttcaggaagatcgcgtagatcgcgccggatgtcccgtccatgacattctccacgacgatcacgatccgcgcgacggtgctgacaatgtcggtggttagtggtggggaggcgtcggcgaggaaggattggattgcttcggcgccgcgctttagtccgacgccgcagtcgccgtcgccgacgattgtgtcgtaccgtgttacttcgggttcggcgtcgatcacacgctgcaggccggcgccgaggattttttggagtatggttggatcgactgaggttgtttgggttagatttgtgttaagatggtgggtgtgatggaaaagcttacgctgtaggttgctgtggatgtcttcggtaagattggaggtcttcagatccacgggggccgcgttacggttgttttcccacgtagaggcactgatcggggcagaccagccgactgcctcggcgggggcgtcaagaagctcaagcatagtagttttcacgcccaggcctgggtcgacgagcttcatcagcgagatgctgaagccgaggccgttcagactggttaggaaagtgccctggatcacgcggaccatgttgacctggtagtcgtgctggagctggcggtagacttcatctgtgataccggccagctcgagcgggctaacaccgccgagattgttgattagcagcacgaattgatcctccggcttgcgggtcacgtagcagcggtctgggtcgttgtggtcgagtagctgtagaagcataccgcggactagctcgacgaggtcgaatttcacgcggtgcgagcccggctcgttgtggattcccatgccgacttcaacctcgccgtgcgggatcgtgtcttcgggtacaccacggcctggcacgtggacgtgttcgagtgatgatcctagtgagactagatttgcgttggctagctgggctagagcatagaggtcgtctagggagccactgatgaaggtatgttagcattgattcgatttctgtaaagtatagcatgtagaccatgatatgtatagactcacccagcctcagccaatgcaccaaccatcttcaaaatcaatacaccaccaccaataccgcgacgaccaaccttcccacccttctcgcgaccaacgccaacatcatcattgatagcaaagaattcagtcttgataccagcaacacgggacttctccgtggccataccgaagttcagcacatcgccggtatagttcataggaatgatcagcacgccattatcagtggggacacgatcgataaccgctctgcggatctgctcggccgacggcgaggcaaagatggtaccggcgaccgaggcatcgcagagcccgtggccgacgaagcctgcaaatgcgggttcatggccggaaccgccacccgtcacgatggagaccttgtttgctctgcggggcgcatctggacggcggaatataatcttgtgctgttggtccagggccagagatgggtttgtgagtgtaagcgagttaagcgcagtgagaaccaggtggtctgggtcggcgaagaaatgtttggctgggaaacggtcagatatgtggggaagatctgggggatcagaggtggagcgtactctgcattgctgatcaaaagtggacagtttcgattgggtataatttgaattgaagagctgacggagtttgaggttttgagtattttaagagagtggtataatgtttctcgagtgtaatccaaggggaacttgtttgccactggggtatgaggcaagattccaagattccaagattctcaaagctaacaccagcgagaagctctcggattggatttgaggatctttgatggggaaaaagtgggttcggtcactgggatcttcaagactcagggtaacttgtatagccaagtatgttgtatatatactgttgagactcacgttgtacggaatatagtcggaagtgtgggagtacaggcactccctccctctttaaggaacccgagcatgtccattcatacaatcaaggacgtgttcctttctttttcccttttttttccagctcacatgaacatccaaggtctgatctgcgcttcggcttaccctctagggatatcccgccaggcaccgcattccagaaaggcgtcttctgtcgtccgaatgggcgttttcaccagagaacattcttggaatggacaattcgatgcatccagagctgtgcaatgtattctagtccactctcgcccgagtggactttcttggacctcaacctggtaagtatgccggcattcctggtgcaccgaccacctcttacttgcttgtatgagttatagatattgtagatgtattctggtatagttattgtagcctataggctttggtctcggctttgatagagaggtccctcttaatacctgcaatagtatctcaggccaatgccaatgtaaatacaaattgccactaggacgaataccgggataccgcaagtcttagtggagacatcatgagactaacgtacaaaagggacagccgaactcggatctgctgtcagatccaggactgtggggtatatgtatagctctaggtcatggggtggtcctttgctcgttgatctcgcagggttatgcttctccaatggggttcgtggatattagaagcattcggatactatacatccactatcattagtattccaactacctcggtgaatatgtatagcacggatttcctctttggtctacccccacaacacgaattctttaattaagggccatcggcactggccgagatcaagtattgtaagtggcttggtgagaccggagttactccgtttttctccaaaggtataatcaattgccggatcccccatactaaataatagtctccctaaataatcaaacatataccaaacactccgtacaaatgtgtgcattcagtgaataaagtacctactctcaacatgtaaaagattatgccttatgacacgtagctgtattgattagtgccttctttgcgctcgagatactccttctcgatcaacctaaaagtcaaaacaatgttagacacaataaccgggaacaacgggttgttagtaaggaggatacgcacttctcaatctctcccttaatatcggccggctgaagcacaccccgggtcttagtagcactgataacctccgcgatcagctcggcgtggctgagggtcttgcggcccttcataatgcgcacgatggcagcttgcgtctcgaaatggcggtcggcagcaacccgctcgtgcgtcgtcttggtttcctctttggtctccttcagctggatctggttgatcttgatgcgcatttgcttgtcgctgaaattcgcgttgtacgagaatttatcgctagagttcacctctttgcccttagggtccttggataagactcggtacttggcgcatgcgagagactggagcgttcgtttcaattccgggtccgctgtgtgtcatgttagggattgttcaacttttagagcgctgtggatccacttacacaatccggtcgcttcttggatctgggggtactgcatgctctcgccattggggatatcgttaaagagcagcaacacaatcgcctggaacgagctgactaccaggttcttctttccgagcgggaagtttgcagtcagctgacaatgcgccagttgatgtttccaggtgagcttgcgtcctgtatgtttgttgtggtagaacgtctcgaatctgctaattgagcgtgcgatcgtcgatggaatccgtacgggtacatcgggatatgtcggccaggaggcggcagagagcacgctaacttcgaattcgaatcggctcctgcgctcgtcctgctgtgaccgtctgaaggccgtcatttcatcgttagcagtgtccatatcgttgaacatggactcaaggttatgagtgaaatttgacccgcattctaaccaaacattagccaaagcgcataacatatggatcttggatgcgacaaaccgttcttcaaacgagttaacatgctcttttccgcatcgttgctcgcgcttcgtttcatcaaaagacgccgggcaagatcgttcttgtaaaaggcttcaaagacagcctttccatgtacgaatcggaagaggtcgagaacttgatcaagctgtcggtcaagctctgcatcatcggacatcaggcttacttcctctgggttacggcctggtggcagcttgtaaccgcccttaaggagcctatccacgtatttggcgatcatttcacccgacttgggattgtcggtaccacctgtagagtccatcttcttcccgtggttcataaaggtaccaaaggcgtcgcggaccgtgtggcccagttcctcattcgactcaaaagaatcggtgcaaatatcgtcaaccttttgcttaaattggagcaggtgaatgaccatgtcggcctccagatcttgattaaacacgatgccctcaccctcctcgatgatgtacttcctaaatgcaggcttcaattcgagactaagatctcgccggtcaagcaaaccgtatagttgcttcaaggcagtcttattgccggctcgcatcaagccaagcacttcgttttcgttggtcaacacgtccgttcgccgtgtcactagagtctcatccaggagattggacagtttgagcttcgtgcttcgattgaaagagaagagaccacaccgttctacctcacgttcgatcaactggtgggaattatcgaggtatgcagccagggaccctgctgcttgttgttgagaccactgcttcacaaactcctcggacttggccatgaataaaggctcaaagtcactcccatacacatcgaggctgtggaaaagctcaatagcatctctaagcaaacttgaatctgtcaatgcctttgtaaatccacctcgatcggcctcgatcaaatcatatgctcctttcacaatctttggcttcagactcgcatcagagaagatgtatgaccggaactgaatcaatcccatttcacgaatcaccggttgttctttagaatgcaagaggaacgactggtcgagataatagaagatccagcgaatagtaacctgggggagagagaccgttagctgtgaacctccattcgagatatttccttgccacacatactagcttggagtgccaggccgaccacgcctcaatcactatccgcaatgtaccgacatcagtgctacctccagctctggcgacaagattcgtgcgcattttcccgctgacgaactctttgcaccgatcctgaagcttcttagccaacaaagctgcccgctcctggcggcagacattctccccgcccttgtatagctcttctagcgagctctctggtttcctgtcatcaaaaatagccgttagagccgcatccaactgcgaccacactttatcgaaatacgattcctggttaagccgcggtccggtacgaaggttcttgacgacgagctttttcgcgccgctatgaggagaaaatgtgttttggcggatattagtattcaagccatgggatctgatgggaccatttaacccagagactccccgacctggcacgccattcttaggcggggaaccggaaatcggatgcatcttatgcgggctcgtttgggttgaggagcgtgagggagacgacgacagacgggaacgcttgtgggtttgcagatcaaggctgcggtcgggtgaatacctctgggagaggagctcggatatggattgttgcgatcgcggctgcgacggctctccttgatcagaaagcttcctcttgccgattgattggcgcttaccgctctgctcggtgtcgcctctcgagttctgcggcatctacccggttcagcccgactgggaatttggggcactctcaacaggctggagatgatgaacaggaaggaaagtggattcgggatgatgttgaggggaattgacgttgcgcttggctttggctccgcacggcgataagatacggagctattccatcagacatggacatcatcatcatggatgaaatcatttcggtgtatatataatgtactaacggatattcaaataaagagccaggtattattgataatctaggtgtgcgaaatacgatatggacatcataacactcgcctcagccattcaggtgtccgtataagaggccatagctacacgactacttatgtacgtatgtatcaaaagcgctaatgatcataaattcacgctgaaaagaagagagagttgtatctagcgcgggtttttaaaagagagaacaggcccaaggccctcgccaacactcactctcactacagcatactactacggaatacgaagtacgaacagggttagtcctcaccgcttgttgatcattgagcattcgcccaagagctgggcatatatacggggtattatatatatatatatatatccctaagttttgaattcattcctcgactctaggaataagtctatgagaagtagatacaatacaacgcacattgaaggccatttatgtatgtaattcatggtacgcattcaagtaatgcaacgctgacaagtacacgatcatcaatgcaatgtccacatgttgttgatgaggctttatcttttgcaaaagactgcgagtgtgtgcaatggaaccataaagaagacgtaaactcataaaaataatcaagaaagaccaatcaatcaacacgcggaggacttctcgatttctttcccataggactgccgcttgttctagaatccaatattagcttcttgcttctactgcattgtgcagctaggtaaccaagggtgacatacgatcgtcggcgctcgccttccttccggaacccttcaatgatcttggccatctctttgcgagacgcattggcatcgatcttccgtcctccgagactcatactcaccttctcatgtgcgctcgccataagcaaccgcttcatgagaagataccgcatgttcatacacacgtacacgccgcagtcgctgccgccgtcttgctggggcgaatcgttcagatgcaggaacctaatgggcatgtttaggaggtatccgaatttgcgagtcaccgtgtctgcctcccagacgtttccttggtatagcgagtcgtagtgaaatgcgatgcggtcgacgaccgagatcaacaggagggaccagtgcgtgcctccttctgcctgggagacgttacgacagtcgttgatgggaaggaagacatgggttgctcgagtgaagtccgggagtgcttcgcggagggtgcgtggatcgggggtttggaggatcatgaatgacatgctggggcggagaaggatgatattggaggattggtatcgtgaaagaaattcatgttcgagatatctagagcaggaaggtcgaggatcagtgccatagtactgtgaagtatgtcggaccgactctagggacttactcctcccagaatgagatgatctatgacacattagctcatgtcccagctagaaggattctctcgccattcaaacccacgttgtctgtgagccagtcattcttgagagtttgcatgtcctctcttgtcactgtttcttcgttaactacctagtccttttcgcgcttcggggattgattccatacatcgcacgtcgtaatctatgagcacccaaaggcgacctgtaagcatcccgtttgctattcaccaaggcggcaagatctgttctaaacttacaactcaaaaatgcatcatctgggttcaactgcgcaagtcagtaatcgtgccgctaataccgaatcaagcgaaacccaccttatcgccaaaccggccgcgcaccttgcgcaacatgacggcaatatgatatgtgcctttcagttgatcacaaaaccgaagtcaggccgctagaatatgaattccttgaaagccgcgggaagagaagctatacactgcgccacagtcgagaacgcaatacgtgcacggtgctaggctcctcagatagccaagccagaccccacaaatcgcggttatgataaacggggcagatctttgcgcaggatttgagagttcgggtgccccgcgcgcacaggaaatgagatgcaacctacaacctcgtttatgcagtggcaagcaaagccggatgcgaaatagacgtcggcaatgttcaagtaacagactcgaatgtgtcccccgtttctgcactggcggagtagaagtgggaccggtcggcaactcgggattgggcggcgcttcggagagggaggccgtcagccttatgcttatgggtggcggagaaggaaggcggaggatggattgaatgcttgaatgctaatgctattttcaattgcgcttatggacaatagctggtcgagtggtacagagtatgctgaggggtacgccaaggctgagagtaagtaagtcaggcagtggccatgcaagggaaggttagactgaggctgtgattttcctttggaatgatgcaatctcggacgcaggaacaggagggaggtagcgatgaaaacacaagagggacaaatccccaaaagaactggactcaggcaggtttgatcgggctgcgtcacatgtggggtcacatgatgggtatactaaatcaggacttatgttaggaagcattgcgaggtagaaatgtatgatttagataagtctgcaggatttattaaagaaattaattcataagaataaggggtatctaaacgtgcatcccagagctccagtagaagaagaggttcagaccatgagctgagatgagaggaagggaacagagatcgcataaaagtggaaaaacagagagcagatcgaagagatggaaacaaggccaaagcaattgggatggacagaaaagaaaaaccataaatcatcagtatgagatgacgccgaacgaaacaaaagcagatcaaagtgacaaagcagcaacattgcaactggtgtagtcgcctttgttttgccctgttcttcaaagggtatgattttgaagaaatatgaagacagattagaaaaagaaacattcaatatgatcctgtaatatcctgtagttagtatgaaaccgtgtattgtgtgtttttcttcttgcggatttgaaaaatgattggcgaatagatcgaaaagatggcgtgagattgttgattcaggtgctgagtcgggcaaaatgtttgttccaaatccagccaacggtcctagtggcatcgtcctgattgcgggcaagccaaagctcacccttctcgcctatgacgtcgaagatatccccggaggcgtaggtcagatagggatatccgccctcagtgcgagtgtcaatgtcaaagtcataaacactcgccgcgcagaacaacgccgcagggcctatgggaggggcgctgcgttccgggtgcccatttacagcagtatcacccggcacatccgacatgggcatggcggacgagaagaatcctgagtatcgatcagtcggggaggctggcaggtagctcgagtgcgaagagctattgatcacatcctcgaggaaaggtgtgtctaggctgagtcttggcagtctagggaaaggctcgatgtcgctggttctcttaagggcgggagcgctggtgacttgttgcagcagttgattggaagtgtctgggatgactcggctagatagaatggaattggctcggtaacggctgctgcggctggagtggctttccatctggggagactggtatgattggctgccgatgctgaaatcccgggaaacgttcggtgaatcatcggtcatagacccaggtcgcgtcttcgagctgttcaccgtagaaggacgacgaggcgacatagaattatgctggtcaccgggtgacagggggaccaaattgagggaatgagccatcatcgccccgttgcaacaacttagctcccccactcgtgcctccatcaaagtgtggtcactattgaagtcgctgatgagcctgtcaaggtcattggggaacaattccacatgagcaccaatctttttctgtagaacactgtaccacacagtttgaatttcgataaagttcttcagacacgctgccatcagtttggaagtcaacgcgtagagtttaggcaattcatcctttaaggtatcattcaaagccaggaactgctcgccctgctcgacggtcttcttgtcaggtttgtcgccacggtccttgatggctttgtagcgtgcatattccgggagtcgcttgtcgcgcttccgcatgacccgctggggtgcattgtaaagtcctagtagttcaaccatcggatcaatgaccgttttgcggacgacagcaagctgcaataattagtgttgattcaataaagaaacatgacataacttacatgttctgggagagcagtcgtcacaagctcctgaactgtcatcttgaactgatgccacttgctctccaattgtggatacggagaaggcgacatgccgatgatctcttcgatcgaatcggcgtactcgttgaactggttcacatagagttgcacatcccgagagtagctctcagcgtcacgcatgacaacctgcaactggaaatagccgtcgctaagtttctgcgctagcaaatcataggttttgtcttcaaacaagtcggagaggccaacttgctgtctaaacttctccgtgcggcgaccaaaggctttagacagaccggtacgcacatcagagtggttgcgctttcggccgacagcttgaccaacgaggtctactcgtttcttcaattcgttgatccgatgagaaacattcgtgacctcttccagagcattggaaattgccgcatggtccgggtgatcttttggcgtggactccaacaggtcgcggagaataagggggtacttcaagattctttgcaccggcttaacgagcaaagagtccaaatcccaggcggtcgtgagatccatagcacccttctggcattcgctcagccaaaagcccacctttggaatgcgctgcacgacctgaagtttcttgtttgcggcatcatggtttttcaggtaatcagtgtacaccttttccatctgcgtcatgtgggcgacaaaaatctgaccaacaaaggtcgcgcgatccttttcgagttccgacattcctgctgcttcggcgccttctggggcaatggactcggcagcctgattgttgcgctttcgcttgctgctccatctcagagcctttggtatgacgtagatactttgagctgcttgtttgagatcagacaagaacttgtcggagaaggccgcgacttggtcggaattgccgaagagaaccttgacatcctcgggatccaataccgtgagcgaggtcctcttgtagatgtcctcaatgattatcatatcatgaccaaaggtgtgctccgtatcaacaagttctttgattatgtgacgtcgcttcttgagacgtcgctgttccggagaaggcgaatccttcggctcaacccgaatggtttgctcggtggatggaacaagtgaagtagcggaggagtcagcggcctcgggagactgaatagactccaaagttcggaaagaagagtcatggctgctgcccgggctatgtcccgcggctctaggagcagcctgggtactgcgactgagtccaatgtggctcgatgaattaagcgaattttgacctccaagaggttcattatcagtagagtgcatcgttgagggcgagaggaatcccgaagtaaatgcatgaggcagagtctggtcgttggaagcttgagcatcaaccgagactcccaggccattgtttttgttggatgcgccagcatcttggtttgccgaaggcactaggcggggggtgagtaccccttcagtgcgcatgccatcggtttcggtgtcgggggttacagcatcatcttcggctgcgatctgcatccagtccatgatggacggagacgcatgttcccaatcatcacgtccaaccaaactagctgtgtgtgagagtgtctctgagtcatggaaatctttgaaccccggcacgactaccggatcctcagttaggctatcgggtcgcccatctgcacgtgtatctgcaggatgagatcgaggctcggacgaggggtaaactgctgggccaaggtggtgactcctgcctcgcgtcaactcctccagatagagctgagtggcacgcttcgaatcccatctgcccaatctagctaagcttggtggatcagaaaaggcattggatcgaaactgttcagatccttgaagtgtgctcggacccattacgccgtgatcctgaattgaagctggtgattcatcgtctaccattgaagctggccttgttgaaacagccgaacaagtttcagttggtggttccgtttcacggcctcgtagcagagaatcatcaccactctcgtcacaatgctcgtcacaggtggaatcttggtgttgcccagatgaccaggaactcatactccatcggttgtgaagatcagtttcattttgagcctggtgcattgacgcacgctcaggctcttgagtatcattactactagaggaattgtagtaaggcgtatctccaagcataatctggatggactctctgtcgtcattctctgaaagactgcaatcaggttcgtcgcatgagtcgtcgctccggttggacccgcggatttgcattatatgatccagaagagtttgagaaacgctgggattgcgctgcagcagcccggactggggctccggatcaaaagtagtgacatgggtatcaccagagtctgatgtggcacccgaatctgtcgggtcatcaacggtaggctgtccttcacctgaagttgttgaatctacaccctgtgggaggccaagagtgggagagtccatcgttgtgtggggcgctgccgtatccgatgccggcagggcagtgttgaggtgcagcctaggaacggcttgaaccccattttcgtcatactcaaccgagccggtcgagtctttaaccatcgtagccatctcgtcggatgacggggcgtggatcacaggcgggttaggggtaattgtaggttcatccatcgattgcttgagatcttcattcgtctcctgttctcgcaccgaagcgtgacgtcgaagctttccagcagttgatttgttcggtcctctgtcattctgattctcttgaacatccgagtgtcggtagagtgcctgttgaatgtgccggcgacgagcatcaaaatcaaccttgaccaattcaggtaatttgcgttcaggacgagaccgcgagttgttgtaagtagcgtgtttttgtaaattcaaaactctatccccgattttggagcgtggggagaccgcagcaccatgtgagacgggttgtcgaggtcgtgaactgcgcaacggaggcgactttttaggtggcggctcagcgatgtaagcttcaagtcgccgactggattcagataactgattgcgtgttcggccgattgttagatcccgcctaccacgcgggttcgtcgcgaacgaagcgggatcatctgctggtatgcggggagaactttgtttaggtgacggaataggaaggcggctgccgcccctgggcggcgaggtaatggcagcggatcggctgctgaatgttggattggaggatggggataagctttcggaaccggaagtgacgaaacggtgcgagcagacaggaatgcgcgacttggaatttggactgcccgggggcgacccatggccgggtttagtctgccgcaagggcgcaggtaccgccatttcaggattccacggatctgcaaggggctctcttgttctatccaaatcacttaggactcggcgatgtttgccggtgctatttatcccggcctggactgcctccaaagaagttgtgtgtccaagataccatgcagtgggcgtgagtggtgattttgcaggatattgatcgagacgctcacggaaggctgggttcgggcttggaatacttccatccgacccacggcgttgttgtaaacgcgatatggcaccgttgttaacctgtgtgttgataggcgacagttcaccaaacaatggccggcgagtatgcgattctgtaatccgttgaaacagagggggtggaatagcactatttgtatctagggccggaccgattctgtctatctctggcgacgacgggttcgaatccgctggcgctcgagaattgctggtgatcgactccggtagcgaatcacgatactgacgacgccgtggcaacacccgatttcgctctccgtcaacacttccggaaggactcggtgctcttgaggttggacgcgaaacagatggcaaagggaggacctgatccgtggttttgttgaacttgttgacaagatctttgaacgacggctgtcgtgaccttgggttcacatgcaacgggggtatgttgaccgagggagctcctagcgttggcgaatccgaggttgaacggtatggttgacgtctagtgcgcgatgactccaacatggttgttggcaggggtgatactttgtcatcgactgaaggatagtcggccgcggccatgcccattcttacatcaccaaacccctctcttacattggatgaagtgcctggcagggatccacgctggcgataataatcagcggggtctggagactcccgtcctctacaatcttgcaattgatcgcccgacgagaggtgattcgcggaagtagaggaattatggggtcgtatgaagcccgacgatagtggagcatacgtggtcgatggttgtgcctggggagagaaggagacggtcggcgagtcacctaaagaagtggtagtgtgaccattggcagattggccaaatgccggagccgacaattgtcgcccaaacggaggtgggtggcgataccggacatcaaaaccctgctcgtcaccgccagacatcttgcatgcttcaggccgacaggtcgacgtggactggtcgcggcctttcggttctgggcgggttgcgttggtgcgttgttccgggatggtcgcccaacgggaatgtcgcaggtgagtcgattcaggctacaaagcaatcctcctgggtggcgcacacccattcagcattcatatttgagacaactcgccaaacaaaaaaaattcgatatcgaggggatatttccccggtcaaagctcgaaaggtaagattgttggatggagttcgaatcggggggatcggggaagagtagagtggtgagatcgaggatcggccagttgccgaaattaaactgtcgtgagagagagaacggataggaggatcgagctccagacggatgttttgtttaccagccgtggctgctgataggtgttggaacctggtagttgaggggtttcaaagcgaatcctgactgtgggccagattgctagctctccgggccaatccgtgttgacaggctgacctgcactagtgacaaagaggtgttgaagttacagtgtcgatctttgaacaatattttgtgatgggtggaaagaaagaattgtgacgagttcgaggaagaagactcgaggaagagggaagaaatcaatcgggactagtggatgatatgtttaaagtgaaactgaatttgggagtggatttggcggatgtggtggatttctttgtctttgttcattgttcagctggatgttgtactgtacgtggaggaatcctatatatcatttcctcggcttgtaccttttctatacatcgcaaatacctcgactacacatccatcacaccagcaataccgcaactgacaggcgtatacctccgtattgtacctcgacatcccccaggaacaagattaatctcccggagacccccatggatgacgcagtggagacgcaatggccagccctggagtatctagaccgccccgttccatggttcgctccgatgtttaattggtagctttgattggttcctgatttcctgatttcacttacttttccacggaagtctcttattgtatgttgacatctatatacttcggagacttcagagacttcaacggctcatccatggttcaagattactgatactaggaaggtgtcgagttcgagagcattcgcgtatccgaactttgtttgccgcgcacacttgacgcgtcgcgcgaacccatcaaaacttatgttgtatacgcaatgaaccaaactcacagggatccgaaaaaggaattacacatttaacctgagaatcgcctctcatgggcaaaaagaggaaaagacccatcaaggaccgcgggtccacgtcctcgtctcacacgggtatcaccacgtctccccgccgtttcaggcctccccatgcgccaattcccctgggaacaaaaacaagccatcccgttatctcgctgtactaccgaaatgtcgtacccttgcgggagtacctgctccataaacttcccgtgacctccaagtcgcgtcggcgccgcatcctgacattgggctcgcgggaagaccaagggaccaatgcacaacttcaaacgtctgagacattggcggagctgctagactccacactggtgggtgtgctgaaggaatcgtctccgacccttaattacgaacgacaaaagcaatactcctcttttaatgagtctcaatcgcggtcaattctcgtcagcaccgataccgggccgacttgtccccaattggaggtgagcccatgacggccgaatcatttacaggtgtcagattgctgatccttgtcgcaggtggttgactttgtgatctggaaaatcttcaatcgtagcaatggctactctaaagaggccaagcatctgctgacgcatggcttcaaacgcatgtctatgcaccatgctcaacacactggtattccaggcattgtgtctcagtttccgaatcagaatgttcaggttctcaagaagggtgcatgggcagaggtcctgggcttgcttggtagtaatggggaggagattatgatgcagctcctttttgattgcggagtttttgccccgatcgacgctgaaaatggcatctactaccaacttagcggtatgattcggtcaagatgtagggagagagttgatcccggtttgctgatatttttataggtatcccactctcggatctcgagcctttgagcgacgcatctgcggaagccaacggctctactgccacagcacaagactcaatgcctaccgctggtcaaagacatcccaaagagaaagctgaatacaaacagagttccgagatgctccaaagcccaaacaacattgtgtttatgcggcgacgtatcctctatgggcgtgtcgagtctaaaaagggagtagcctctggactaggacagaaacgtacgtgcttcgccgtttgaataatggattttaggtttatgctaattcccattagatgttcttggccgcttctcaacgcttgattcgatggcgcaaacagtccatgttatgaagtacatatttccccgtcaattcggcctgctgaatgtatttacgctggactcggatcaacgcaagcagatgaatgactcgaatggtttcatgtctcgtgagagtgagatatctcttttggaagaacagaaacgaccacaggggcctcagactgggagtgaatcagcagatgcaggttgtggtggcgtgaaaagtgtcaaggtacctaagaggcttcgtggaattactatagagcttgtccggaagctccggaaccgcaacgcacaatgctcctacggggagttgctgcgatactattgtccaaccgaagtgagacacttttgttcacattggctaggattgtgtagctgacctttggcagcaaaccgaacccagactccttggcgcatttgtctccacaactgatgctaaaaaaagcgagcctatctcctctctcgagtcaaattttgtaacacaggtgaactacccgtcgccaagtgatagttcgcagacctcatgtgatggcgcgagatcagagccgcacatagctgtcgacacatcttgtggaaacgatgccgagaaaccggtgatccgaaagactcaagtcagtctaactgatcatgcgactccgccatcttctgtctcggcattttgtcgagcggtaatccagaaattgatcccacggcagttttggggggttggtccagatggtatttcgaacttcaagctggttctcaggcatgttgaccgatttatcaaattgcgccgattcgaaagtctaagtctgcacgaagtctgcaaaggtgtcaaggttggtcattgcttgcactgaactgatcgtctgagacaaagccgtactgatccgcacgctagataacaagcattccttggctggcgccaccccaggtccagactagtctgccatctgagacaagatcgaagatcgccctgtctgacttgcacaaacgcaccgagctactccatgaattcatgttttggattttcgattcactccttattcctctcattcgttcgcatttctatgtcaccgagtctcaagtgcaccgaaaccgccttttctatttccgccatgatgtgtggcagcagttgacccagcaacctttcggtgacttgaaggcaatgatgttcgaggagcttgagtcagatcaagcccaacgtgtgctggcgcggcggtcctttggtttcggtgctctccgtttgcttcccaagtctacaggcatccggcccatcttgaaccttcgcaaacgagatttgaagacacggtcatgggggaaacgggaaacgtaccttggcatcagcatcaattcaagtattacgcctatttataacatgttgacctatgagcgtgagcaagctcctgccaaattgggctcgtcgatactctccgttgcagatatgcaccgccgattgaaggcgtacaaagaacaattgtcccaacgactgccctcggcttctagaccttggcaatccaagctcccaccgatgtactttgtcaaggttgatatcaaagcttgttttgacactatcccccagaaaaagctgcttaatcttatcgaagagctggtctctgaagagagctactgcatcgcaaagcacaccgagatccacccgcccacttctactgcgaaacaaggaaagcccatacgaaggtttctgagtcgcgctactcctgctatgaaaccgcaacacctaccagactacgtcaatagcgaaagcacgacccgaaaggccaacaccgtttttgttgagtgtggtcaaaaagaaaatgatgctgatagtcttctggaacttctcagtgaacatgtccagaacaacctcgtgaagataggcaagagatttttccgccaacgcaacggcattcctcaaggctccgtgctatcaagcctcctttgcaatttcttctatgccgagcttgagcgaaaggtactgaatttcatcaaacccgaggattctcttctcctgcgactcgtggacgatttccttctggtcaccccggatgtagctgtggcaatgcagtttctggaagtaatgatcaggggccaaccatcgtacggtgtacaggtcaatccagcgaaaagcatggccaatttcagcgcagcggttgacgggattttacttcccagattagagggaagcacattatttccgtattgcggtagtctcatcgacactcacacgctggaatttcaccgcgatcaagaccgcatccttcagggcggcgagtcggctgctgctactctctccgatgccttgaccgttgaagccgcccgcctacccggccgtacctttcaccgcaaaatgctctcctcattccgtctgcagctatattccatgtacattgatgacggacacaattcgcgcgcagttgtgctagccaacctctactgcagcttcatcactgctgccatgaggatgtaccgctatatgaagtcgcttcggggtcgtgcgcatcccggccctgccatcataacacagactatccgcgatctgattcggcagacgaaccgttatatccaggcccggcgtgctggtaattcggagtccccattctcgtgtttcgttcagcgatcccatttacagtatctggcttctgcggcatttcggtttgttttgaagcgcaagcaaacacggtatgcggtggtgctgcgctggctagactcgctgagtaaagattctcgacccacatcagattccgaggcttcgagaatagcacaggtagtgaagaagggaaatgccatgttcgaggaatggcggttctagaatagttagtgccggaatgtctgcaaatcaagtaataatcggtgtaattgtacgatcaattgccctcgactagtataattgcacaattgtacgctcatctccctggggccaattaaatagtgcatacagtgccacaatctattcagcccgccagcatcattgggcacaaatccggctaaatccgattgaaacagatcagggttcaggggttcaaatcaagatatctttgatctgtgttcagggactttcaaggctatgtaggttatcccttcccatctgggtagagatcagtttccatctaccgtctaccacatacaacatagaatgtgttgaatactttatcgctacttcttaatagcccctttttaccctagtgaaacaaggtagcgccgaggtacccccctgttctcagccagaccgagtgcggcataacggcctgaggctctccgcttgcaatcttgagcatcacggtttcttcttctcactctcttttggattctcactgtcttcgtctctcgtttgaatcttttacttcttttctgcttacttccacccccacactcttttcctactgttttttgcttaccctctacaacccccctggccctcaatggtcaccccgtaatcttctctcctgatccctctttacacgactacacctgatctggatctcatcaggctgcggctgtgcctgcaattcatttctacattaattgacttctattgcggtattattctttcctgtctggaaacgcctgaccattctcattcaaaaacaccgatcttcacgtccgttgttgaccccttccggacatccgccaatttcctcccaccctgtgtactttttcaggtcgatcataattgcggggatcaatacatctgaataattacatgagatcatgaccaccgttttcccgacacccaattcgccccccgagctctccgggtccaaatcctccaaatcctcctcgtttcattcctcctcccacctggacggtgcggagagtatctttacggacatctcgaattttgaagacattggcttggaagatgataccgatttgacatacgccgatcctcgaggctcctacgcccgctctggggtgatggcacggtcgcccgccgccagaatatcaagcaaagtccctgcggcctcaactcgcgacttgaccgcggtccccaagcctcgcaagcgaagccccctgcccccgctccacagcggttcgaccaatgtgtcggcaggctccctcactgcgagaactgcagcccgaaaggatccaggcaacacattgcattcacccggtttgacaccatcgcaagctcgccggtcacggtctgtctcaccactacggccgacatccagtcgctccgcctcgagcaccagcctgggtctctctccgctatctgcacgagtgcccatccagaaacaaacttggcaaccgaatcgcaagtcggtcaaagatttggaggaagaataccatgactcggacgatgaactaccggacgatgcaagtctgtggaacatccctatttctccgcgcccagttcaggatcgggctccatcacggtctgccagtccaaatgggcgcagccccgggcggcgaccactgcctatccagcacgtcatacccgggagcgataagcaagcgtccgaaaatacggccagggcatcccgcatgaagcgtataccccgatcgagctccgcaggaccggagcgtggacaactgtcgccacgcaaccctcgtacctactcatataacagtttcctatctgacttgtcggaggaagctaagatcatcactgaagctctggagctgcatgctgatgatagagatcgcaagcgggaggagcatattcaaaccggtgctctgcggaagtccagcgaggactcgcatcgcgcatcccgtgatgctgtcgctttaccgcctctgcagaaatcaaatatcatgatcgatccgctgccaattagcaaggagaaagaaagggtcctcacgcggacacgccccagctggcttccgcctaaggaccagaaggaggagagaaaacatctaaagcagtatcagcaaatgatggcccagtctcgagaaattggtatgtgcaagacaagatccgtaaagtattgtcgggcttctaattggtatttcagagaaacgcaaagctgccagggaggcaaatgcacagtgtgaaaaggataacactcgagctacactgcagaacatctgggatgaatatgtgtatccgaattgggaccgcgctctccgcgagccccgaattcgcgagttatggtggcgcggaattccgcctcgcaaccggggcaccatatggaaacgagccattggcaacgaactagcattaaccgaggaaaccttcactaaagcgttgctccgagcaaaggatctccaaggcaagaaagatgtagaaagcgagaacagcaaacgactactggactgctttgaggcaatcgaaacggacgtgcccaaggccttcccagatatgaacctcttccaaggatgcggtccactacggcaaaccctcattgacgtcctgcaagcatactgcatgtaccgcagtgacgtaggatatatccacggtctgcacaccatcgccgccctcctcgtcttgcaattccccacccccgcttccgccttccttgccatggccaacgccctcaaccgtcctttgcccgtcgcgttcctcacttgggaccgcggcgccatggcccggtcctacactctagcctcagacaccttgcgctacaagttcacccgtctacacactcacctgaccgacaccctcaacctttccgaggcagagatttgggagcccatattccgctcgctgctgacaaacggccttgacctcgagcgcatctcccgcgtctgggactgctgggtcttcgagggtgatcgcattatgatccgctccgccgtcgccattctgggctgtctccaatcgcaactgttctccttccaccagagtgatgagcagtcccgtctagctgtgcgcgacgtgttgggctggggtccccgcagtcatggagccaacacccagaaacccaaagagcggcatagcgcccctgccgcagctggctttggcggtgggcagatcgagaaccccggcattgccgattattgggttcttggtgcttcgggcgacgaggatgacttcatgaatgccgtccgcgaggctggaaaggtgcgccagccaattcaataggcttggatataatacgtgccttcgcaatatgtgtgctctggtctgtcaggttctcacctttacttcagcctttcgttcttcttcgttttcctttttcctccttaccgtaccctcatcattccagatagcgcatagaatggcatcacagcctggccaacgtgtctgcttgccttcctatctactatctacccgtatacacatgtcactcgttgcacagccgttttgtctattctatgtatcttgaactgactgcatgagaaccactcgtttctttcttctcgttatattttttgtttttctttccacccaggaaccccaatattcttagctcattgattggtctttttcacttcttcctggttttcccactacttctccatcttgtatttttagccaccccgactttcatgccttgatgcatcgctgtttttcatcgttgatacgtacttgttagtggtattacaagcaattcaggtcttttgcagtcattccactatgttcactgagaaatatactgcattgcatagctggggagcatggttggtattggaggaactgactgataaatgtttcttaaggaacccccatcatgcagagccagcagcaagaacatatcccccatcaataacaacagtctgcccattaaaatactgattacaaaccgcaaaaagcacagcaccagccatatcctcatctctcccaggcctagcaacaggaactttcacccgatacttctcatccggaataaaactcttctgcttctcatcactctccccagtagtcatctcactaggaaaaggccccggcgcaatattattaaccctaacccgcagcttcgacgaactaacctgctgcgcaagcaacttggtcaaatgaatcgccgccgccttggaagcattatacgcaaaatggtgctgcgccatcttcacaatcccagacatggaagtcgtgttgagcacagtgctagaccaaccatctccaacctccgatccgcgctgcagcagcggcaggaacgccgttgtcatgaagaagatatgtgagacattctcgcggaagacctcgtcccactcgtcgaacgtcgcagccgggtcatcgaacagagtttcgcggagctcggatgcatctttgcgctcagtgtcttgcgtctggctggatattccggcgttgttcattaggattgagaggtagccttcgcgcgtggagatctccgagactagtcttctgatctcgtctttttcggtcacgtcggcggcgagcgggattattttgccgcttatgttgttgccgtagagagaggctacgcgctcgagtttgtttgcggtgcgtccggttatgtatactttggcgccgttcacggctaaggcttgcgctgccattagtcctattcctgagccgccgcctgtgattagggccactgaggttgttagaacagggttgttgcactggggtttatatattgctcacctttgtctttcacgttgaacagcttttctagcttgaggctttggttgctttcactggctgctattttggtcttgtctgaaacgggggcttttctagtggaatttattccaaattgacgagatggtaggagagaacatagcttgggtcggattaatagaattgaccttcgaattgtttgttttttgctgaggactgttgtgtataatcgcggcatggctgtatatatagacgaggtaaaatgggggcaagtctttaggacaaagctcgaacctcttctagtcatacttcgcatgttgcggccatgaatcaattgtaggtcggcagttgcttcaatcaactatcttgtcagcatccaatccctacatacgaagtgtatcagaatgacgtcacttaaattatgtgaacagagcagaaagactcaaacggacagcaagcacagaaaaagcagagtaataaagaaaatgaaaccaactgccatgtaagaggtatcttactaattattgtagaagtgactttggttacatttttgagaatcctcatgctggaaatatatttactacctgagataacaggcaatatttagcatggcctgcgtggccttcatcagaatcctatcatctgtcatacattcacagcttggcctttacagccaacgcctcgctgaccggcgccacctcaaccatcatcttaccggagttggcaccagcatagaggtcaatgagaccttgaggcgcagcctccaagccaccaggcacaatgtactctttgcgcttgagcttaccctcggacaaccaagtcccgagatccttgagtgcagccgggaattgcttcgcatgatcgaagacaatgaaacccttcagggtgatccgttgcgactgtcatcaattagccgaagtccccataaaagacacacccaaaaccaagagaactcacaatcacactcataaaactggccggaccctgcggcttagcagcattatactgactgatagcgccacagatagcaaagcgcgagccagtagccgctctcgccaagcaagcatcgaggatatcaccgccggtattatcaaagaagacatcaatatactcaggcgtagcgatcttaagctgctgcctccaatccgcatccttataattgaccgcagcatcgaaaccaagctccttgaccaagaaatcacacttctccttagtccccgccaaccccacaacacgcttggcgcccttgatgcgcgcaatctggccagccaccatgcccgtcgcgcccgcagcaccggacacaacaaccgtgtcccccttcttcacctgcgcgatctcgatcatgccaaagtatgccgtcagcccggtcatgccaagcacggacatcgcgtctgtgggccgtccgcctgccggaacgtgtatcttttccgcctctttcgcgccgaccacggcatactcctgccagccggagccggcgacgacccagtcgcccttgctatacttggacgtcagaccgctgccgacgatgaggacctgagcgatgctctggccgcgcatcacggcgccttgctcgacgggggcaatgtaggagcgcttggcggtgagccattggcgcatggccgggtcgagagagaggtagtgcacgcggacgagcagcttgtctgtaggtacatccttggggatggggatggtgtttagacggaaggtgccattgctgagagaggggtcgatggccggcgcgggaggcttgctgtagatgatttgtttgttggacattttgaaggatgcttgaggggattctgagtgaagagagaacgttcgttgtcgaaaaggaagaggagaaggtggaaatatctacaacatatgtaggatcggagacactccagattaggaaaactgctccttgggcctcggcttgtccccgggccaaagtcgaagtgttgaataatcagcttcttgcagatgcattatttttttactaggacacaataggatgtctatgtcatccatcccagaagggccctcaatgaccgcaacaagatatttatatatctcgaacgggtgatctagggtctgcactcatcctgacgtcattgacaaagaagtataaaagcaggaactgcaagactacgaggactgccacattcttctaataacaccgagacaagaaaaataaatacaatctccatattcaatcatgtcgcaaccaccctaccaaggctatgaacacgccgacccaatccatactgcccgcggcgaagtgggtggcggctcctcaactggcgcccaaggcatcccaacaggcctccacgacacacgatccgattacgatgaatccaagggctacaactctgccacaggagccagttactcgcgagcatcggcaggaggaccgacccagacccaccagcgaccgctctcaccgtcgcctcgcagcgatgaccggattgtaggggatgcgccgctcccgtacacggccagtacagcgcagcgcgcggaaatgggtgatcgttcggctcatgggactcatgggtctcatggacggtctggtgagaagttcggggaaagagtgaaggaagctttcgcgtcggttcatgtaagttggaatctttctgctcttgggaaatgagaaactgaatttgctatagggcgctggagaatcattgcgtggaaacttgaccaccgctgttgatcgggcttttgggtctgaggatggtgctgagcggaatcaagagattgcgaatagaggcgaggaggagtttcggactggtcagtttgtggggcacagggaccatagaacataatgtgtgatattgggaatgtaattaggaatctgggatattaaataagaacatagctattgaatatgtatgttatgccgtcgaaggttagggcccggatccaacgccgatcatacatcatggtagaaggagatcgatacgatatactccataaacctgtatccatcagccaagcatctcccctttgctaagacattcttaaaagttcttaaacgttcttagaattttttaacttttatacaacgtaagttccagagaccatccgaccgacccgagaaggctgtgctggtggaacccacctgtttccggttatgaacgcactcgacacaacattcttccttcaagtatattctacaaaggcattcctataatcctttactccgcattttgatcctggcccacatttgtgcatatagccaatgccaggtttggagacagttgcacactcgtacgacctcatgctttgaaactggttgataagctttctttctcggcatatatcgtcatggtctcaatttccgccgaccaaccggcgtcggaaagcgctgcgacggccgccccaacaaactcgcaccaacaggcattgtactcctcggagacggcatcctcgaatctgctcgggtcagactctccctcccaatattcgtccttctccagctccgatagcgacgaaccactgagcgacgaacccatcccgcactcgaccgaggtcaccgatgaagatgccgccggcgacgtggtgggggttagcatcggacgcgagcagagccgcatgaaggcccgagcaacccccgtggaagagaagaatcgcgtgctggaacaccagggatcatatttttcgactataccggatactataggcgaggatggtctgtttgcgtcggaactcacggccgagcctgaaacggtggagcccaaggttgaaaaagcaccagcaccaaaaccaaaacgagcaccaacatcggcaccaagaccagcaacgggcggggagaggcgcgaacataaacctaggccgtcatactcctccgcacagtatgatgagcctgaaccaggcaagcttgcgcatggccctcgcagcgatctatttgcctcggctcatgagaaaaccgggtcgaaagatgcagccgggagccagcggtctggttttgtcggggccttgttgaagaattcattacctcgccggccacgtgcctggtccaacgagttgaagaaattcctacctgacctgacctctttgaggaaacggccttctctcgcgttccgtgcccacaatggccaaaatcgaattcgcagccagacggtagcccctgcagctaaaaaacccttgagccagccgaaaagaacatcatcgctggtcctgcacccgcaacggtcacctcttgcaccgagcggttcaagcatcgaggatgaaggagaagccgctcagtcgatacctgagctgcgctcgccagatgggacctcggccgcgaaacattcctttacacggcggcctagttcagtcatgcccggtcgaccgccaagtttgcggaggtcctcgtcggatcaatcgctgtatctgcgtgcgtcttccacggcatcgtcccttgaacagcgaccattatacgagaatgtacattctcaggtaaatagccggttcaaggcaatcaaagatagtttccaagactcgagtaataggctgctcagcatgccgaatctccatctgcaggatatccgcaatgagtggggtcaattcctgccagagcttggaaacggtaacaacaacggtgctagtagtacttccaaagaggaacaatcaccgcgggctgaaagcccaccgccaactccgcggcataatcctaactcatcacatccagtcttggaagaagcaatggaagagctcacgggcgatgttgtgatcctaggaggttaccggggatcaattttgcggtctgctaagccaccccatcgtcaactttgggtgccgatgaaggttggtctgaatctgcgcaaagtggacttggaggtcggcctgaaaccggaggacgaggaacacatggaggagaccatcattccatccggggttctgtcccacgtgggcccggtggacgtctgtcgacgattgatgaagcggttacgcaggagcgagaatgcccagcgtggtgaaatgcgcgtccacgattatggatatgactggcgtctaagccccgagctgctctcgcgcaggctcatcgccttcctagagagcctgccatgcaatcaggagccttcgccgggggagccccgacgcggcgctatcgtcatcgcgcacagcctaggcggtctcatcacccgacacgcggtcaacgagcgaccagatctcttcgccggagtcgtatacgcaggcgtaccacagcactgcgtgaacatcctcggaccactccgcaatggcgacgacgtcctcatcagctcccgcgtgctaacagcccaagtaaacttcaccttccgcacaagtttcgccctcctccccgaagacgggcactgtttcatcgacaaacaaagcaaaaaggaattccgcatcgacttcttcaacgctcaaacctgggaagattaccgtctctctccttgcatggctccagctctccccgtacccccaacacccaccaccctcggcttcaaagacatccccataatcggcaagcgcttctccatgggtcctcgcgatgactccgacgaatccatcacccaagacccacaccatgtcacacaagacggacaccactctactgccgcagtagataaagacgtctccgcccgtaacaacaactcaccacacagcgcggccgcatacgccgcatacgcatctgaaaaagcccacgacccagccgacggcttagtcggaccaggcgcacacccgcgcagcagcaccaccacaacctccaaaatcgccacgacgtgcaccatcccgcacgccgccgcgagggagtacctagagcgcacgctggcagagacaaagcggttcaaggagaacctggcattccggccgacactccactcggagaacaggtacccgcctgccgctgtgctgtacggcaagacgctgccgactgtgtacggagcgcgagtcgtgtcgcgtgagactatcaagcaggtcgatgcgtacgatgatcttgcgtttgcggctggtgatggtgtttgtcttgcttcggctgctatgttgccgcctggatataggattattaaagatggtctggtgaagagtgaacggggccatgttggattacttggtgatcttgagggcgttgggcagtgtctcaaggctattcatcggggtaggaaggagggagttggattgggggagaagaacatataagggttcgatgtgcgttcgtgttattttctggtgttggtctttttcttgatgatctttgatgataccattgccatatgtttgatgatttgggttatgttttttttttctgtttgtggatatggtatatttagatgtgactgtgtcatattgcattgagtctggcatattggcgtttctatagcaggggaggatgagactatttacatagaaatagaaagatagagaagaaagttggagcagagctcaatatacggatatggatagatcttgcacacacgctatgtaaccctatgccattctatgcatgtactttttgtcctcgtccaataccaattggaatagagaccgtctatcaagacaacagaagaaaaggaaacagtatcccggaattccatcacagtatatgaaagcatcacagtatatgaaagtaaaaaaaagatcatgaagaaggatgctataaaaacccaacaaaaagaaaacaaagtatcatcaagtctttaatccgtgcgcgagttggcaatgttcatgaccaagatatcactcgcgccgaccttaatcagctcatccattaccgtggcaatgtgcttcttctccaccatggagctgacagcaacccagccctcctcctcgagcgcggtgatagtaggcgcacgcttgccgggggtgatcttggacgcgattgccagctgctcacgcgggatgttgtattggcacaggacgaacttctgggcggtgatgacaccacgcagacgggagctgagtatagtgagcatttcggagttggtcttgcgggacttgaccagcacagcggtgctggagacaacagtgtcaattgccttcaggccagcggccttcatagtctcaccagactctgaacagatttgagtgttagcaacgggttccggttccctgttccgtattccacaggacagtatttcagtagactggcatatcacaacataccaacaagatcaacaataccatccgcaacgccgagagcgcaggcagcctcaacactaccgccaacatacttgatattcgtggagagtttctggccaacttcggcgccctcgaggttacggaagaaagattcagtgagggcagtgaagctggtcacgacgttgcggccaacgagatccttggcctctttgatatcgcccttctcaggcacctgcacttgcagcttgcaggcgccgaagcccaggtcgaggatctcctcgacgttggaggcctcgccggtgggcagggtggcatcgtgctcggcgacctggtcgcggccggtgattcccaaatcaacgcggccttcgccgacgaatgtcgggatatcggcagcgggcaggaagatcagcgcgatgggcaaattcttgaccagtgcgatatcgaggcgggtttcgcggcggaactggacgtcacagccggcgaggaggtcgagggttgcttgttgcagacgtccttctgtatagtggagtttgcgccgtcagtcttggtttctttgtgtttgtttcttgttcatgtgggtatcgctgctcgcatctatgagtcacgatttgggagagcacttgcttttgggcacggcgaagaggagacggccttcgaggctgtttagaatcgttatattagcagaaatccccatgcggtttgtaattgaaattgactcactggttgacgagatccatggtgatagagcggtgcggcgcggggctttctacagattttcggtggggggaataaggtgatcggggatcgattgacgaagtagtcaagtcaattgcaattcagagaccgtgaatataactcaaagacaagatagaacgattgatatagtccggaggagtcggggagagagaccggagcttcttgcggcagaaattggaggggcagattacaccggtgggttagttacgggaccgggggagtatgtaccgtgttcgctgcgcagtacgagcccacgtgatgggattctgtggtgtatggctatttgaagtgtctataggatatacatggtagagtctagaatgagtttctaatcgattgaataggataattggctgtacaggccgaagttgtctaaaagtggtgctgaacgatatcggagtccgaagaaaatatgttctgcctgaatatgcctgacccatcaggtgtcaattccatccgctgactcatccactgcctgacggctcaggtgtccagccctgagccctcgcgtaatttgcacgaacccacacaggccaaattccactttacactctcttacctacagtccaaccaattccaaccctcgagctcaacgccctctccttccctccaagatggattccagcaagcagcccgttaagctcgtcaaggtgacccgtgtcctcggccgcaccggtatgtgctttcccagcatttttgaagctccaaacccataattcgatattcgatattcgcggggtgcaaccattgcgccccggatcgcccgaaacaaaccgatgaaaaccagacacttggaggaatagcaatcgctaattttggtctatttaggatcccgtggtggtgtcacccaggtccgcgtcgagttcatggacgacacctcgcgttccatcatccgtaacgtcaagggcccaggtacgcgatattgatttctttgcatctgtcttttgggatcacaagaggagggagaaagaaacatggggtctatcgattcattctgtggaaagagccccatgttgaaatatggaattttgaagatcgacccaaaagacaagaaaaactttgccgaaccgcatcgctaacatattcctccgcaccagtccgcgttgacgacatcctctgcttgctcgagtccgagcgcgaggcccgccgtctccgttaaaattcaccaaaacgaaatttcgcttgcttcgtctattttgtctctcttcttctctcgcatatcccttacgaccggtttttcatgattactcttcggccaaaatcgagtcccccgcttttctttcttgccgtaccttcaacctcctatcctcagccctaaaccgccgcgctgcccaatcatccccacctgccgactctcaaggggccgtttctacgatttccgacgtttcgactggaggtgacagtttgggtggattgacttttggtttttttattttaaacgaaagtcccggaaggtcgattatggagaaacgatcgtgagagagaggagcagagagcgcaaaaaagataatagaaagcctttttttttattgatacgagaaaacgaaatcaggttcttgcgcgagggctggtttgtggacttgtggcacggtctggtctggtttcgatcttggtgttttactacatacacacgtccatttaggcgtgattgcatgggctcaatgcgacaaacgaggttgttatgttgtttcctctcttctcttcctcgtaccagcttcccccattactggtacttagaaaagaaaacgccgactcgaaccaggccccgatcgacaaaaagaacaatggaatccaaaaaaagtttgaaaatttccggttcagccttgtcgaggtcgaggtctgaaagcgttcgtagaatctgccagtgtagtcttgtgagtttctagtctaccaagtacattggtgtagacggtagctgtgctatgtcaaaccttcgtcccttctaaattggaaggtctgtatctgatgcgttttgtcgcctttttgtctttctagatataaaaccgagaagtgggaaggacataaagacacaaggccgcataagccaataatgtgatatttggcttttgctataaagcttcaacaaatgccatacttattctactatattctactaatgtatattactccatcacagacaatcgcaagattcgttctccgacatacatggtcctagtgagctacagctgctccgcactggccatgagcctactaagaaggccgtcatcagcagactctccgtcgagaccactctcatcaaggacccgaccaaccgcccccagaagcccagccaaccgcttccgccggatagattcctctagctcagcactcttctgacgggcgacgtcaataacatcggagggcaagttcgccagacgcgcaacattcaacccgtaactgcggtgcgcaactccctcagtaacctcgtagaggaacgtaatctccccatcgccgtccttgtccttgctacccgtctccgtgaaccgcatatggacattacggagagcatgatccgggaaggaatgcaccatgcgcgagagatgctggtaatgcgtgatgaaaagggtgagtgattggatcgagcgcaccatatagtcaagcaccgcctgcgcgatagcgacaccgtcgtgcgtcgatgtgccgcggcccagctcgtcgaggataaccaaggatcgaggcgttgcttgcttgaggatatctgctgtttcggagagttcgaccatgaaggttgattcgccagccagcatgttgtcgaaggcgcccatgcgcgtaaagaccgcatccaggagaccgagtcgggcggaagcggctgggacgtaggatccgatctggcccatgattgcgaccagtgctacctgtcgcacgtagctggatttaccgcccatgttcgggccggtgacgaggagggcgcgcgtgccgtcgtgcgatagatttgtgtcattgggtacgtatgtgtctgtgaggagttgctcgaccattgggtgtcggccctgctcgatgtggaggcctgcttcttctgtgtattctggcttgacatagcccggttgctgggctatgtctgcaagtgataataagcagtcgagtgtcgcgagggattgtatagaatcccggaaggactgatactgtgctgcgatatcagccaggagggttttgtatgcctggtcgcaggctgctgctagggcctccttgtactgatcacgctcgcggatgagctggatgacttctggcgtgtggaagcgagacactctttttgtgccgctgactttgacccacgatgcgggcacgcgcttgagtgccggggagttgttttcgatctcgatcaagtactcaatgccggatactgtggagtattcgactttgcctcttccaattgttgacgctgcctctttgcgatgttctaacaatccgtgttcagtgcttccaatttggagcttaagttcgccgatctcctctgtctcctccgcttcgcgaaagaaggtatatttgtcattggttcgtgcagcgtgcatgttgatcttatctagatacttgacgactgacgctcggatcgtaggcagagaggcgatggcctcacccactagcgatgattggaaccccgtctgggcaggtgatttgatatctgcaaactccattgcaatcatctgcatagcttgcaatacagtgagaagttcgggtcgctcacacttggctcaacattagtatagatgtggtcatcattgcagaagtgttacctacctttccatagtaaatccggattaaactcttctcaagatcactcttgactttgcgtagcaaccctcgtactctctccaccggaaccgctcgcgcaggatcaataagctcctcgacagcattcgtccgctcctcgaggcgcactttgtctagcaaaggtcttccaacccattgccgcagcatgcgttgtccgaatcgcgtttgcgtccgatctaaggtccagaataaactaccctttgtcgagtgatccgtctggttttggtaaatttctagactgaccagcgtgtttccgttcagaagcatatgcgaacgagccgagaagggctggaaatattttgtgaggtcaaacacatgttccagcccatactcggtcatatgttcgatcatagcagacagacagatagtcacctgctccgggagactaaggacgttttgaagcaacttcgcagcttgggtatcctcctcggtactggtagccttcatctttcctgcataaaactcagatacatggctatgtgcctcggcggcggaggttttcttcttctgggcccgttcgaggcgcacggcgtccccaaagacattcatcttgcttccagataaatgctgcacgagtttttcgctagctcgggacatctctccaacaatcaagatctcacagggggcgatgtgtaatagtcgtgtctcgatctcgctccgcatgaagccatcctcaaagtcatcgtagataacgtcacccgtagccggctggacagcgacaatccccacatgaactcgttcgtcgttccccgggcccttggcattggtctccgtcatacagagcatgtacccagtggcaggagaggcacctcccgctgccggtgcagggccctgcagaccttcggcgtcatcaatataggttcctttcgtgtagaggttggttaatttgcgaacaaatggcgcattgcgattatcacccgcagccttgagcgcagcggtctcgatctgtcgcaccacgccgaccttgtggccggctgtaacgagtcgcttcacatgcacgtgtagtcggtgcaccgggatactagccgatgcaaaccggccaatgtgtgcctcggatggatctgcggtaggtcccaacattagtatgctttcggcaataatagagaagatacttacgttcgtcgaatctgaacttcccggggatgcacacgattcccagctccttggccgcaatgcgcgcatcctccccaaagaagcggaacttgtatcccacttcaatgaccagcactgtgttcatgttctgacgcttgatctcaatgacctgtttctccatgggtgtgagcttgctcccggccttcttcgcaccctttcctttgaccgagggtggtggagcaggctcgtcctcttcctcggcctctgcagcttccacctctgcgctagctgcatcattcactgctaatctcccaatgccaacctggcaatctgacccaccgagcttccgcacgaattgctggtgtagtttctccttctctttcttccgctgtttccgctctgggtcttcctcctctaccgcagctgacggagcggcaggggagctctggaatttgaagatatcggtacgctggctgctgctgcttgcctgagaggtgtgctcgaagtgcacgcttgtcgctactcgtattggcgcctccgcgactgtgcccgtggttttggctcgctttggtgctggcaccacgatatcatcatcatcatcgtcatcatcagcttccggggtattgtcttgcttcggctcgggtttgtcggctggcgatgcttgttttttcttgggtgcattggccggggttgatgcgggtttctgggtgaagaagctagagatgctcgcttgctttcgtttcaatgatggagagggtgcagaggattgcgaagaatgaggtgccatcttgacgaaggataccaatgctcccaccgcaagtatgtggagtggcagtggagttacaggttgataataggagagcgacttcaatggaattcaatactgaggtatttaatctcagcttgatctcaaattaggtatgctccaaataatgtcccatgtgagttctccgcatctcggagctcgacgcgtacagaacgcgctagccctgggcatccacccgtggagttaattggttgctgactcatcacccccaatcctgcccagcccaggtgaattgctattttgtattttactgagaacaacttgagtcaattttgtgtgacaaagaaagcctatgtctatgaatgtctacaaggagtaggtgtatatgatttgaggtttgcatgagtgatgttgagtatagacatctacaactctgatagggagagagtgtgataaattggtggactatcaagttcatgtgcacaaagaaacaaatatcacaaactgcatgagcaaacaaaaccatcaatcaggcaaaacaggtaagcgacccagggtaagagacacggggcaagagacacaaggcaagagacacaaggcaagagacacaaggcaggagacaaaaggtaagacaaagcacagtcacaaagggaccatgaaggaaggaaccttcaagaaagaaacaaaccctcagagaattcttcactgggcaacagagggctatctctgtgaaaaggttccaaaaattggcttccagagagggccagaggccgtctccaggagcacgttgttcagctccacatacgtcaatggagaacctggggaagtacggtcggtgtccacagaggttgcagggggccgggccacaacatgcttcgtgcccttagatgagcggagctcgaacctagttttcggcctaacccaggccgcagcaaagatcgacgggagacagaacgagtgaagaagaaagaaagaagagagataaagggggggagggggtatttataccttcccaatggcttaaggcaacggggtaatggggttggtgacgatttttgaccaaaagggaaggcacctgaccaggtacctgactaggcagctccaggcagcggtctctggaccctttcatcacttcagactgtatagcatcaatggtagctcctttctctatcttcccattgctctttcaggcgacctgcacactgatattcactccagtatccgtataatcatagagaagcccactcctccagccataaagcccattatcatcaccctcagtctctcaagatctctcatccctctccccatctatggtccccgaagctgacacattaccatcaagcctgatcaacttacccaggtgatccacctatctcctcgtagcctctgagaaacagtaaggtaactcaacgcagggtttaagactcaactactagctgtcactggttttgccgagtgagcgatgttcacgttcacgttcatgttcacttaacatggctacatcccctagatccagaacaagaataatacatatagtctttacagaggaatatgtctataaggaaaggatggtattggtacagctttcacgtacaatagctgttgttagtctaatcgagtcaagttgcgaccactttctcctttcgtcttctgaccagggagtgtggtgacagacagtgcaagtgacgagataccagggcgacaaaatgcgattggtcgctgtagacgtgtttggttccagtcatcacaacaagcaatggagagaagctgaaggccagctccacttgttctcagcgagccgtcattcagaggcgaggaatagccggggcagctcgtatcagatgtgggtaaagtagatttaatttgctagacctggccataatgggccacattatcataccttcccagcactcgttcgtttcccgtattaaagtacaagaagagcaacatattaaaatgcgcctagatgatagagggtactgtatgtaggaaacacgagacgtagatgtactcgaagaacatatcaaacggatatctccaaaggtagagacgtcagaagtgatgaaacactggtagtggatcggttgttttcagctgctgcttgttgcagatgatttgaatgatctgtataccattgccctcgtcaaacagatgttgctggagcggcgatggagtaatcgatttgcagcaaggttataccatagcctgcttgctatttcaaagtcttcgcccgattccagggttacacgcttcgacgacatctaggttttcaaagactcgactatattgagcttgagtacagtagttatgcatgatcattatgaataatgagaacatggagttggcgagtgttcatcatagatgtgtcggtaagtttggaaaggcctgtctgtacatggaggtacagaaaaagtcgttcgggcagctctaggactttacgaagaggacacctaagaagaattgtcgagatctatacatgctacatggtacgaaaaacgtttttgatagacatttcatattgatactggctaatcataacattgtacagcatatcaaacagcccatcaaggatgggaaatacaaatggacacccatggataatcacaattgtttggaaatagcaattaggctaggtgtcaataagtccgggtcgtcgggcaagcgcaaatcatggtcaagctaccattgtcactgtctggggtttcggtcacatcttcggtcatttcggagcatttcatatcatcactgtatcgcagggttgaccagcagattgcatctgggatagatcaacagggtcatgagatcatgacatttagttcgcatcggtagtcaaatagtatccagaaaagaggtgcccgtcttctgggatggtttcttcggatggaactgtctggtcaattgaaagccagccattctgagcagtatgctcctcttcatactggctgtcatagaaagggtgcttcgagggggcttgcagggggttggagcgatacgcagccttgtcaaagccgtcgtattcaccaagatcaggaaggcatggtgggtcgaatccaaagtcatcaaggaaattgcgtttagcaaatggggagtgccaactgtgggggccaattcggccttgggggttcggaataggctcaatgttctctttgtcaacggaggtgtgtccaattctcaaggcatgactaccggtgttcgtctttccgttcaaaacaaggcgagtgggggtcaaggtgtcaaactgcgttctgaatcccgggtccgggtaggatgatttgctatcctcttcttccttttcctgatcaacaaaaatgccgaagccacctttgggccgcttgccaaaggtgttgacagtaagaccaaactcttcatcatcgccaacataagagtgagtacggtccgctgcacggcgcgagcgacggagaaagctttgttcttctttggcctccccttccatgttcttgcggcctttgtcggctttctgtctttttctgtccacagcacggggcacgttggggtcggctttggttagacgagtactcctggtacgagcgatgcctcgtctgggaactggagtctctcccttcagtgggctgtattcctccacgttacccgtgataatacgctccttcaacagacctccgtgtggggaaaagacctgttcggttggctccacgagcgaagaagtacgttccatcatcttcaagacagcaccatccttcttctggttgcgtcggcgacgcatctgcagcgtggcggaatcaaaaagatccatacctggccacagaactcccttgagtcttgcgatttcttcggcccgagtcttgtccatctcagggttgcccgatgcctgtatttgatcaccagaatcgataaaaggatcaggggtatctttgctagcaacccatgttctctccaaggggtccggtttgtatcggcgctgtatcggtgtcacgggcaaagccaatgatcgattttcatcagctggtccagaagcatcgaccggctgcaacccgtctgactttgtgccattcgaggatcgcatcgagcggaggatgggacccgttcgagatttcacattgctgtttgccataggcaaaggggttggcgtaatgggcgggatggttgtctccgcatgttgctgtttgtcattgtgagaatcagccaagcgagggtcgaggcaatcggaaactggggtagttgtgattgtagtagtactggagccctcagactcgacattgggtgctcggttacttgtatgtttagcggcggaagccaatgcgtcgtccgactttctttttttccgaacttctttgctggccatgcgagcagacagctgcttcgcgtagccattggcgtcaaaccaatcgtcgtattgcttgagaagctcgatcgcgttaggatcgtcggtgcgaagcttgagcttgaagtggctggccagatgagccttggaggcagcatgggtcaacaagtgagagacatcgctgaaatggggctgcccaggacagatgctacacatgaggatagtctcagccatgatccaaggccccgaaggaggcaacaactaaacagatagaacgagatgcaactggaaagggcaaaaacaaccaaactgtcgaagccaaagcaggtgtgaatgaagctggcgaaggagcgatggaagaggacgagagaccgttataagcacgtgcacaaggcggacggtcgtgcctgtcttcattatcaataagctattgatattcgaggaaggtgcgtattgttgggtcgcgggtaagtcacgggacgtcattgatacctcaaaacaactttcattcatcttgtcatcattatcttaaggtacacaatgggtatgtgccacgatgtcttaacagctcttgggccattgtaggggggtatgaagcggaataagtcaacgtggtcattattctccccccgcattgtatcccaaagtccatagggcaaagaacgatgggttattagattgcgggaggtttcaatatggatcgatcattgatccatctatcaatcaactgatgaactacccggcaaggcatttggtggtgattgacttaggcatgcaactgttgattcaagttagcaaatcatacgatagaatattagatactccatagctcactaaacagcatctatttcttcgaggccatcgaatttcaataaactcagccctgcaaggctgaaatgcgtatgatacacatccaccatatttcccggtcgatcagcaaagccaccagcatcggcgtcctacgtaatggttagcaagagactacaagacacaataggcaattaaccaacctggcattgtaggacaaatgcggcaagcttatcgccatcgatccagtgcagacggtcgatcatggcaaggcttgatcctacccaccagctatagcaggcatctgcaagcttctctggtcgaccattgaaaccaccgctttcgatctggcgctcactgagccaagctccgagtcgatccttattcaccaagtctaagcgaccagcgatggccaacgcgccaatgcaggtgaatacctgaccagcgtgggactcggcaccggggcgaatgccataagctccatccaagttctcacaactttgaatgtgagcaacggctttggggacatcgactaggtccatcagacgcaacagtgacaaggcattgagggcaccatataagaatcgggtatctgtttcgccccactggtctcccatgaaggagccatctgcattttgtaggtttgcaatgactgtaagtaatagtttagtaaaccatccttgatatcagtaagtataagggaattctgtacaagacccaactttctccttgccgcctcgaccccgcttctcaagttcatccacagcatcaatggttacgaggatctgaacggcagagacagtatataacatatgggcatcatgacccggggcagcaccgaagcctccattctcattttggcatgaaaggacaaagtcgatggtctcatctcgaggtaaggtatccggatgacctaggatatgcagggctgtaagaccccaatatacaccgtttagtcgtaggtgctcggtcagccaatattccagctcatctttccgctgtgtcggtcaatcatcaccattcacccaacattttctttcaaggagcacgcacagtgtccaggttcttgatgtaagtaacatgctttgaggtgtgtagttcagagtctgcggggctgaccccggctctaccagggcccgatactagggccatgtcttggaatgatggaggtggctgattagaggggggacactgattggatagtggatgtgcaggttagtagatcgaaggatctgagagcttgtgaaattattaatgttcttagtagaaggcggtgaagttgtcagctagatcctttatgcacgacactgtgcacaaaacgtggcttgactttttgatggaagaagaagaaagcggttagtgggattcaaagattatttttggaatacttggcccgtgaccgctcacgtgaaagtcacgtgcgatgggtctcggttaataataactatcttatcgattgtataactactcctgacaagccctaaaaggttgttatgttgtacattctgccactatataatcaacactgattggtagaaacccaatcatatccactcagcatgccctgtgcaccacgctcaaagcactgtcatccccgaggcgctagtttgacatctccagccatgtttcagattggatggaacctcaaatgagaggaatgcgaaagcgagggcggtgtgtcagagaaccttgtgagccaggaataggtaataggaattgtatccaagggtgtcgaagtataactaatagaaattgtgcgggtatagttattgcatgcagattaatatcaaacacaatctattttttctctctagcgccccggagtattatcagcgttgtagctccgagtcttcccatgttatacaaagtttggtgaacaacgcagacggacctcgggaaacctctctgtttctaaaaatgtctctaaaacaggaattgagccatggcctgagtcttcatcggtaagcgggaatatgggttccaaggttcgacccgagacccaggctactatattaatttataaaagtggacgcggcacttcggacacggacacgtttgtgcattaatttagctcttacccctgatatacaacgggtttgtgaaatagatatagagtattaatggctgattaccttgaatgctatagatagactatttggccctgtatgtatatttgtacgcttctatagtaaccataaacaaccccaatcccaaccgtggatattccggcaaggaaaatcaggtactgttttattgcactgtaactggctcgccgatttaccaatgacaggccacatccactgtaacgtaaggcaacacattccgtggctctgacctacaaaagtggagagctctgatcattcgtgtactccggatggagtacagcccactatcgtatcgagtacattcgaactaagcaaatagaatctcatgccgtaaagctccagtgtcttgggtttggaggtgacgcgaatgtcaattgagtaattattattcatggaagttaagatatttatgatgcttatccaccgtcacattcggatcatcgcaaggtgttgggtctaagtgacgtttcgcccttcaggggggatcagataggaattaatattcccctctttttttcatagaattgtttgttgtatgttgtagatgttgcagtaagaagattatatggaaatgtttcaagtcaatataattgtgataattccaattttaattctcaaatcataactaattcttatactaatacctaataactatctctgatatgatctaataattatgacttctataatactagcgcggctggtctgatagtctctgctcggactagtgtaccgctaagtctattaggagaaacttggactttggcgacttttttttgtttacaattctgcaattcctcacctttcacatctccgacttcgacaactcctacataatacatacatcataccctgggatcactaattgtttcttttgactttgatccacacgactcctatctcgccccttccctgccgatcccttgaacttcgaagcgcccaaaaagagggggaaaacgtgaactcgcactgaacaagcccccgtctctcaaaacgtggagatatcggtgggaataatcgaacccataatatgaggcttttggtgagtgatcaacggacaatcaggacccgtccattgtttctaccatctccttcctagccttggctgtcaacaaagggtcgaggtgtggcttcttttaactcgggctttgcctgcatatgtcacctgcggtctcacctcttgtcttcttttctgactcttctgtttcctctcacttgtctctgatattgcgctgaccctataactggcgctccagatcccgcatcctcgatacttcgtttaatcccatactactttcgtcattacactggacgttcaggtagacaacattgcctatctcctagtactcctcagcttggaatccccttcgcgccccccactacacggccagacctcgatcattgatccccgtacaaatctctcagtcgcatgcctgacgtcggctttaaagctggccaagtacacatctagcagcccaaggatcaattcatctgaagctccaccaattcttgacccccaagccttcaccatcctggatcgggtctaattgccgcccaacatgtcgaagcgaatgtccacagtgcccaacctcgatctgagctcgtgcaagaccgactcgaagaaggataaagcctcatcgcctgtgacgccatgtgaccgtagttcagacggaccaagccccttaacaccgcgttcgcccaagtctacatcgagctctccactcttcaaaggcgcaacaattcgccctgtcgcgcaggactccgacaataaggcaaccagccctattctcccacatactcctggcatagagcctccgacacccggattcacagcgattcctcaacatttcccttctcccaaagactcaaggcatacgcgcgatgcctcgaaatcatttttcggcaacctcaaagcaccgaaaccatcccacaagtcacaacattcagatagctcggagaactccaccgaacatcccaagagtagaggcagctccagagaacggaagatgccaatggcttccaaacagtacgagtcaacgcctgaccttctaggggcacctgcccgtacgaatggaaccgaaaggactagtgagttcccctcgcgacttatgtgtagatcatatctaacaaaagattacagacggactctcaggccaaaatgattcgcagcaaacaggcgccaagaaagtcggtacggatttagagtccaccgcgccgaagaaaaacaaacaacgatttgcaaaccttttgacccgatctcgctctattcgagttgacgactcctccggacccagaccaccccgccggcgcccctctactggtcttgcgaaactcgaagagttcagtcaaggcgcaacgacgaccgcgaatccaccccgttgcgcgactgcgcgacccgaacgtggaggcttgcagcctcccgagcgccaagccgacaccacctctttgcgaaaagagcgtagccacggtaatatggtcgcgtcgggttcgttgagtcaagtttccggcgcctcggctgccattttcaacaatctgaagtcttcatcaagcggcactgcagatcgtattggcaaggccgggaaaggattctttagcaagatcacccgtagcggcagcacgaatgagagagatatgatcaccgatgattcgtacacgtgctcagtgatcaacctaccgctcattgagcaggcgagaaagactcgcattgcgaagaagctcgaagactgccgagacaagaccgagttctggatgcctgccttgccataccgctcaattgattatctaaacttcaagggttgcgaggaagagggcctttaccgtgttcccggtagtggcagggaggtcaagcactggcaaagaagatttgacacagaactcgacatcgatctcttcgaagcccctaatctatatgacattaatacggtcggatccctcttcaaagcttggcttcgtgagcttccagatgagcttttccccaagtcaacgcaaacgatgattgctatgaagtgcgaaggtgccaagaccgcaccacagctactcaaagacgagctctccaagttaccgccttaccattactatctcctcttcgccatcacctgccacctcaacctccttcactcgtacgtggaccagaacaaaatggactaccgcaacttgtgcatctgcttccagccctgcatgaagatcgacgcattctgtttccaattcttagtatgtgactggaagaactgctggcagggttgctggaccgagaaggaataccttgaacttgagaaaaagatggacgagcgcgacctgcgagtctcagaagagcaggaggccgccaaggcgaaggagcgggcctctggcagccacgaacgcgcagtctcgtcttccagcagcagcgctggggaagaagctcgtcagcctcttcgtcagcccttgcgccagcctgctcgtgaaacatcccgtgaaccatctcgtgagccaccccgcccagaaactgctcgccccgaaaccgctcgcccagcaatggctcgcccagaaattgttcgcccatccactgctcgcacccgaaaggccccgccgaagaatatcgagacgggacacacccggagcatctcccagcttcccgagcttggcccgccgctctctcctatcaaaatttaaatgcgaaagacgtctttcttggcatagatatgtctcagatgaaaacagcttcacgtcgttatctaccttttatgacctgcttccaatttggctggcccattttcctttctatctgcaggaccagataggattggacaagttgtttcagaatggaactaccttccaccaccacttttccctctccccatacttccgatacaatacctccatcgcctactaaccgtatgattgatggatatccccattcccatttggtctcatatagggatcagatgttctacaatattcccctttgatgtgtacatcttttgctctcttggcattttctctgaaattggcgaatggccggccgtttcgtttactcgtgctatactgcttgactcgcattgtttctccctccttttttgctgtctcttgtctatttggaagcgcagcaaatctcattccatgctttgcttgatattgcaacatctccagattcccctctgcggttgacattgatttccatcatcgctatttgctccatgcccgtttgcttcgttttgaaatggggtctacatttacattttgctcatttttgtttaaattatgtatctagcgtttcctttcgaggattgtacaatagagaaagcgggaaggctcactgttcggttcgagcaagatcatttctggtacaataatccccatagcctcacacagataatcaaaaatattgagctatctagtaaaggccatcgcaaatatcgacagatgcaataagagtgcttttggtgaatcacggtaggtccacaatatatgaagaatcccattcgactcccaaccccaacgccagagatgtaaaacgaatcaagacaggatagccagaggccataaaataagcgtgaaaaagaaaagaaaagagcacagaagaacccgatataaccagctcaatcaatgacaccctctcacttcgcacgagcagggttcgacctcttctcattcgaccgctgcttgcgctcattacgcttaatacggtccttgcgctcagtccgcgacataccgcgaatgttacttccctcggcattagcctcgccctctttcttccacttcttcatatcaacctcaacaagccattggttctcgtcgtccttgttcttgcccttgtaaccccagcgcggcacccactcgcccgaagcctcgtcgtattgcagcttcttgcggcgctccttgtcctggcccgcagcaccgggctgctggctgtacttgccgatgcccttcttgcgggcgaacagctcccatttcgtgggtgccttggggacgggcaccggcttgtggcgagggaggtggatgttcggcgctggcagggtgagaagaacgccgtcggagacggaggtcttgatctcgcaagttgtcaggagctggttgagcaggacttggacgccgtcgcgggctgttgctttcagcgagtcgttcagggtttggtctgcggggagctccaatgggttggggtcattgacgagcaggtggcccaggtcgaatgtgtagggggtgggctttgagacggtgattggcctgggcatggacgttagtttctatatttttcttcgttttctcttcttggctttttggtcgtgtatgcggttcggaaggagttcttacagtctctcggtcttggaaccagccgcaggcttgggcgcggagttcgccatctcgatatcagacatagcaatactgtagtattggtagactgttgatgttcaaaggttggtatcagcccgaagaaaaaaaaagttggttatcagatacagccgcttttgcttttctgccatgactaaggcttcccgaccgcctttccttctcagggcgggcggatttcgcatcaaattattgaccgaagtgttaactgctgttgttctctcaactcaattcccacccacttctccatctcagcaccggttgtcccctcactggctgcgccggtgtgactgacaacaatggcctcctcgtggtgctggaattgcctctcgaggcttcgcccgacaccgcgagcactcctcccgccgtccgcaacgccccggatttcgagcgcctccttccactccactgccgtgcactatgccctgccggccaagaagaagggagctagcttgacctccatgaagcacagacagtcaaccagcttgagaaggaagaagaagaaggtcgctgaccgcggcggacgccccccagccgtgggtgagcgcaaggccttgcggaaacgcattgtcctgagcaaccccaatgcccttgagattgagggcatgctggagctgtccccggagactatggttgattcccgtctccgtggtaccgtcctgggattgcctgtgccgatgatcgatcaattgagagcagtgcaagccttcaagcccaaacagggctggtcgatattccgccggcctggaacagtccttcgacgtgataccattgagatgggtcgtttgtttgagcagatttctggggatgccgatgaggcccagaagggcaaggttgtcaagaaaattgttactggtatgaagggatctggcaagaccgtgcacttgctgcaggctatggccatgggcttcttgaagaagtgggctgttatcactattcccgatggtatgtgtatttgctgtgtatattcaattttgcagctgctgacctgtcactcttgcagcccgagatcttgtgtccggtgaattcgcctacgccgctatcgaagatagcaacccgctgaagtatgtccagcctactgcaacctcggctctgttgactcgcaccgtcgatgccaaccgggagctcttggctagcctgaaggtttcccagaaacacccgagtctgaagatgctgaagccttcctcgacccttgaagacctcgccaagcttggattcactgatcctgctgtcgcctggcgggtcttccaggccctttggactgagcttactgctactgcccccgccgcaggattggagaaggacttccagccccgtcctcctatgcttgttaccgtggatggtttggcccactggatgaccgagagtgcctaccgctccgctgaacacaagccgatccatgcgcacgacctcattttcgtccaccacttcctctcattgctgaaggagggtgaatccctgaagaatggcggtctcctcctttacgccacctcatgctcgaacaaccccaaccccgagggtctcaaaattgctctggaccgcttggccgcccgtcaggccggtatcagtgcctcctcgccggaattcccgcaactaccagcctacagcgatgccgatcctcgcgtcgtggacttcttccaccccgcagagaaggctgtcagcccactcgagttgcagacgctgggcggcctcactcgcgacgaggctcgtggtttcatggagtactttgcccgcagcggcctgctgcgtgagatcatcaatgaccagtgggtgagcgagaagtggagcttgtctggcggcggtatcatcggcgagctggagaagttcggccgtcgtgttcgcgccactgcttctgtctcgaaataagggttctatcttgcatttctttctcttgtcttatctccggctttcagatttgtgtttcacgtttacaactgtatatcggatcctggggttttccttgtgtgttctttgcccatgtattttacaaatctcacttggtccgcttgtgtctgtatgcatataatggatttgttttggaaaagttttatattcttcgtctcttgcacctacacgataacgaaagactaatccgaacaatagagactcgacgttgaatcgatcctctagttcacatccaatccagcaacacctcacgcatccaacttcttcggcctaggcgcacgtaccaaatcaggataatcaaacttagccgccacattcaggaaagacgaattagccgggtgcgcctccttacgcacatcatccccacgacacaaaaagttcatcgggaagccaacatcaaactcataagccccctcaatctccgccaaatcctcatccgacaaatcaaccccaagcccctcaatattacccaacaaatgctcaaccgtacgcccgcccacaatcggcaccacgtacggcgccttgcgcatcacatacgccaacgcaacgctggtcaaagcagttccacgccgacccgcaacagcctccaacaccttcgacaccgcaacatcctgctccgtcactggattctgtcgtccggggttcccgctgcgggcgatctcttcccgctgcgcggttgttttgaatgcgccgccgccgagagaggcccagggtgcgaggcccatgccttcggacgcggccatggggataatgtctcgctcgaaatcgcgcgttgcggcgttccacttaccctggtagacggagaaggggcggaggccgtgatcgcgtgcgtctgtggttttggttttggttaatttggccttggacttggtttgggggagtagtggtaatagccagctgtaatgtaaaacttacattgattcgccttgctcacgatccatgcgggggtatcgctgatacccaagtatagaaccttcccggctaagaccagctggttgagggaggtcatgacctcctcgatggaagtgctgaaatcccaccagtggacgtagagctatatatacggaagttgttggttagtatagtctcggtgagtaagtaagccggaagaagcgagcagccacgtactagatcgatatactccgtccgcaatttcttcagactcgcttcgacagacagcttcagactcttggcattattgccgacgaagttcgcctggatctcagacttgttgtgcgtgcggtagggcgaggtatactttgtcgcgaggacgatttggtcgcgcacgccgcgggcttccatccactcaccgagccatttttcggattcttcggcttggtagttgttggctctttggattttgttagtgattagatcctttgggaatattcaagactgattgattggtaatatgcatacgtgtcgatgaagttacctccgttctcgtagtatgtatccaggatcttgaaagaggtctctttgttgcattcgccgaggcgttctttcctgttttagtgtaagttatattgtgtttggatatataaggtaggtattctacgtaccagccatcgccgaagttcatcgctcccaggcatagtgggcttactttgacaccggcagtgggcgctaacagccggtagcggccgagatgggactttggggtggcagctggggcaaacatgatggaaagggggattcagggtaatttagtatagaattaaggattgaagatcaagagactcaggagaatctctttcctttatagccgaagtcattatatgcggggttgaatgtgctcataatccggtggttgcatcgaggtgtagcatgatgcctttaattcctaagtccggccaaagcaggatttggggggaagggggggggggatttagggttaactccggttttatgcaataaatgctacttgtttactctctcgcatgttgaagtaatgaaataagccctcgttctatttatagctcagatcccgtagaacttcaactggacactatatacggggctatccctgtcccatctccagaatactcctcctcagtcgcctcctcagtcgcctcgtcagtctcggattccgggtcatcgagatcgtagaattggtcatatatatcatccacaatctctcggtactccatcaaatagtcatcaagttctgaatcgccctctccgagaacaccaccccaagtttcctgctttgggggaatcaccactggacctggtgtccaatcagcattcctattatcctgagtagcatcgccaacagacacagatctagccttccccttatcaatagaaggagcaacccccctgccttggcatcgagggcactcgcagttctttccaaaaagctgcacggcatgcatattgagatcgagcttttcgccgacgggatcagcgatcctataacgttgatagggaattctgatttcttccccggctttgatatccttgttcgcccagatcactacgcggttggggaccttgtcatcgtatccccacagtgcgttctcgaaagggcgacaggaatgattgaacatgcttaacccgggaaagaggtagaagtttccaaacgatggctccattgccgagatgtcttcttttttctctctcattctactctgtagagttgggtgcagtacaggtttgggaccatcacggtccttgaacgttgggtttgcacctcgtcgcgtatgttcccagggtacagcattgactagcaacttccgcagcaccgtctgaataacccaagtatcgaaggagaggtcgctgaatatgtccactccaaggttggagaggatatcaaaaggtacctggatattcccggccagagtaaaagggaaccagctgtccctccagggctcgttcgtatcggtacctgcctcgagaacgaggagttcgttgatctcatgcgcgagaagattagggtcctcttggcggcgatggagcgtaagttcaagcacactcttcaagagtagactcaaaatagtcccgtggcgttcattggtgtgggtgaaatactgcgatccgccccatgccactttatttggtcgcatggcatcgtgcaaccatccccaatcgagaccgcagaattctttgaaatggtatgtttcgcgcgcaatatccaagcaatgaggagccactccgtctgatattgcatcattgggaaaacagaacagcagaccgcccctagtagctctggagtaacctacatccacacatttacatattatgtcaaggcacgcgcaatcatccgggtgtttccgtccggaaagaggtgccgggttacgaatggagttccagttgtgctcgatatgccgaaccaagtcagggttaatcacggcttgacagttgtcacatcgtggggcatggagagggtcttcactttcatcgtcaagcagcctgttggggatgagatttccgcgaataactggttcctcgtagtgaatcatggttcctgctttgatgtttgcagtggcaaagacccctaaaccattgaaggaattgtcctctctgagggtgggctgcacctggcatgtccgttggaaagacttccccgcattgccactgaccgtgaagatatttgcattgagtgcattgataaaatatggtgcctcgcgtctcacgtctgcttggtcgtatggatatctatcggcgcctgaaatccatccgcggctccactcatgtccataaagggatggatgaagcgctgacggattatctcttctgtgctcgatccccgctctcacaggagcgctcactgtcatccttttcttaggaactgacatatcgcggtatgacaggggtctttggagttgacccttcatatggtcttcgaaatcatcccaacaattcagtgctgcgaggctgagactggtgatgctgtgaagggcgttcctcagagttgggatgaaatagttgataccgtttgccttcctcatttgcaggacctcccttgtcattgggactcccttgatcttcaattctaccatcaggtgctgctggatggcgtcccaaacacgggtatacattcctggccgcttgttcctttgggttgctgtcgtcaacacttcgcagagaagctctccgcgataggcgtctccaatggcgagatcgaaatagcccagcagataatgacaataagcacggctgttccagtaagttggattgtacgggctgagtttaattgctgctgtgtacatttcgagtgcagacatatctgttctcgtggcagggctcactacagctcttggctcacgatagataccccaatgactcaggttgctttgtctcaagaccccaaagcgctcatcacattcgtattcccatagacggcgttgtaggtctgtctttctcccatctgtgcttagaccccttaatgtcagttcatcggtgagtgtatctttcgtccaaagacccggatctctgacgttcagcccgtgtacaaaaaccctttgctccaatgcatctagcccctgcacgccgttgtaggtctcatctaagccctccgcggtgaaccgggctcgtgcatcatcacgcgagatcggcagaattggattgctcatcaggtgttcatagacattgtgagccaacgcatgcattaccgattcttcttcttcggttgctcgtgtataaggtcgattcgcatgtgccttccatgcacgtccgagggattcatctggctgctgccaaaatcgacgggcaagaaacgcgttgtcttcagtcaacgccggggctagcggcgctcgattgaaaagatccggccgctttggaaacgagggtggatggacaatgtctccacctgggtagacctcgtataatcgtttcctcggatccatcttgataccttggtggatccagaatagacaatcgttctagggatgggtatgtgaacgtggaaagagtatggcaggtctcaggatttcgatttccttgggccacatgagactgtgagtccaacacagacccatgtagttgccatgggagtatgaatgtcagattagtatcatacttgccgcagatcatggctgaaggaatccccatatcaaagggtcgggagacaaagaaagaggatggtttatttttggagagaacgccgattgagggtatatttcaacaaagaacagtgaaaaacacgtgttcttttggaataaacttgctttcgcaacaaaggaagataacaggtcccttgaataacttcatatcaccaatatgcctcggaggtacttgaaatccactctacttttagcgggaaaaccgccaagtatactccgtactagagatagcaaaacaaaggatgagatgcgactatgggattttctggaaggcttgtaatcctaggcctccaagcccttggatgcattccaatatatacatgtatatatgcccaacgggcagtgcgcggtcgtagttaagaagttgcactggaagtctcgtgggggtgacgaccccgtgctgaccccaaccccaacccaacacgaggatcaacacagccctggaggaatccttcggcaccttgaaaagaccggactcttgaaatattctcatgtcttgtctttctaaagtgctctgattcatcttaccatgcacggacagtctggtcctccctcacagccagaatggcgacttcctccgcgtctctcctcgccgtcgcaaccagggcctcctccgcctccacgtcccccggttgcttcatatgcaccagctgttcaatattcgccggctgctccatattcgccagccaactatggaccgatttcaaatccacagagactgccatcaccgagtgcgggtgcggatacaaccacgtggggagtgcggttcaaccagagctccggccccccattgccggtaagtcgaacgttagaaattcaaagtcgcataactaacagtcgcatagcctcgaccttccagtacaaatgagcaacggtacgcctatgcgcaatctcagtcgtatccatctgtcgcaactccttttcacggaatccaaccctctccccccccaccttcatatacaacactaccaccaccaccatctggtgttccacaaccgccgccaaaaatcccacaaggcactcaacatgtagcgggccaacaaggcgatcagacggggcgagctccactgctcgcccagggcgcaggagcggctgcgatgtctgggtcttacgaattccgccctgcgcctaccctcaatacaaatactacatctgtcagcgcatcggctctgggccctggaactccatcggattgggaacattttggcccaacccctgggcactttgatgatgcagcgtggttcccacctcgcaggacgccctctctgcatcacgaagggtctcaaccaccatcaaagcttccggacaatgttcccaacgtgtctgtggaagacgagtcggacattgttgctcgcccgagaacagatacaaatcaaacgcttccaagtattgtctctggggtcacacagtcgggacagggtggctcaaattcgcccgtcagtccatgcacaacacatggaataccaacaccgccccaactggtccgcacggataccaccagctctgccttgtctacaggtggacgttcagaaagcatcgatgatgtaataaatgcatgggttcgcccattatcgcctgcgcataaaccagttcaaccggaacatcaaggcctccccggcgcgttctaccagactagcccagtagagcgcccgcagtcaacgcaaaacagctcgtcatttttcgaccatttgcagtcgggctcgaatggttctgcgcaagtggtcgaaggacccagaagggtggctacgccagtaaaccaagaccccttcgaagatctggacccctgggccaaatcatcgttggaaagatatgtcgccatgctacgtaaggaggcagtggctgacttagatgaagaacgatataaaatcttcacggcttttatggccaaagagactaagctccggcagattctctataatattgagcctgagcctgaaagtaaatcgctgactctgcaagctcctaatcctgcccctcctcagccgctaccaacttccaataaaggcgaaccagctgttgagtcgggactgatacccgttgcgtcagaagaaattcctccctcggcggcaacggcaacagaggatgaagatctcgatgatgttggcagtgagtacagttcaggtggtcgtcctctgctcgttaagaaagcgcaaggaggctcgcaggctgttctgggcttacctactgcgccctcgggcgcagagtcgaatccctcaagacccttatcgatcatatcgatggatacgcagaagcaagtcttggaacccttgactacgaaccccccgcggcctatatacacgccattccagtatacagagggtccccagcgaggctcggacaacctcacctttgctcgcccagcatatcaaggctattctgacctgcggcaagcagctgtcagtgggcgagtcatgtcaaatgcaccagcaccagcacctacatctcgatcgaactcaaatactgcacttgcttcttccgcgcagaaagatcccgacgagacctttttgggtctaattcgtcacaagagcgtcgcttattctaaaccggctgagcgaaactctccaccggttccattgctgccagaaactcttcgtcaaggccggtcgaggggcctcgtggaagaattacgcaccatattacggacacccttggacaaacggtctgaaagctcatggcacatcatgactcgggaagaacttgaaaaatttcctgatgatttttcgtacattcgacggaccgttgatcaatgggaggaaacagcacgagccagacggcaaaatctggaacacgagcgcatggctcgtcaggatgaatctgagcggcacatcgatgatcttttcaatgggaaagagatcgggtatgcagacatcaataccttggaagaagaatttcggcaaagcgaagctcgggtccaattagaggaggaacgacacgaagtagacgatttcatgacacatgtgttcaatcctttagatgaaggcctaaaaaatgagatttcggcacttcgcaagtcctatgactctgctctcaatcaactcgaccttgatcaacagagcaaaggttcaccaagcgagcgaggcagcccatccgtgaccatgaaaattgtcaacgaccttcacaaaaagcttgagatccgattccagaaacgtcttgatatagcccttgactgtgagcaacgacggaagagggctgagcggcgaccacttgtggtcatgggtgatatatcgggtctacaaaaactagacggagagtttgaccaaatggaacggcgaaacattctggaagcgtgcaaggatcgtgatgatcgagccaaccgactcatggattccttcgacgacgcaatcttgcacgggctaggtttaaatcagagcctcctggacgaggttgcgtcgagaacagcccgactagataccgccaccttccgagcctccggtctaccgcgctctgaaattgggcagattctcaaatccgcggcaacctttgcggcgtcgctcggagctgattcggaggccatcatccgcagcgctggggttgcagacatgatcctaaacgacgccgactatggagtctccgtcgctgaagcgcgttatgccaactcagatccggagattttccatcggctgggggctgagaagataaaagaggatgagaagatccagggtgaaatgaattcaaagttgcagagcattcaagaggggcctgtgcagatcgaggccaccattcaacgtcttctccttggcttgcacaacgacccacaagccgctgcccctgtctctccagttcaaggcttctcctcaacgagcccatctggggaagtgcctctacatcctccaagtcttcgcccttcgactactagcccgggtccatctcccagtcccgcgcccgtgagccaaactacggatgaagacttggaacataaacagaggcttcgcagagcattagaggcagccaagcagcgcaacgctgccaggggccattgaccgagttggggggccgaatggaacatccacgacgcgacgaattgtgatgaatttccttgcgtttctagcataccattttatctgtttccttgtcctgtccttcaaatgttgtgtttctgctgtcacgcatttttggttgatacccactttatgcaactagttaaatgaagactgccccatgacattcattcgttctttctctaatcaatcaacctctgtatccaagattggttccgcttactccaatcctcgacctcgttcgcctattaggattagtagaattcgaaaacagattacccttgagacattcatgctttctttcaaatcgttgccagattgcgctaaacttcattcagtcaaggaaagtcctacattgttttcgtgatgtaactctacctagggaggggcgagtttacaaacattgaacatttgaagcgggggcttgggcatctttcaaaatattcactttcccgttatccaaaaactcaaccagttgacttcattgcttgctcaaattgaatccacatccagttcacaatgcaaccaatttctagagttgactgggacaaaggtgataatgatgggcttgtcactgtcggttcccataacctctacctgtccgtttcggggccagatcgcaagcctggagagcctatcgttgttctcatgcaaggccttggcagcacggtcgatgagtggattgcagtgcgaaagcttgtggttccatttgctcgttggttgaactatgatcgttcagggttgggtaggagtgaaggtcccaaccaaacaccaccaagcatatctgcagcatcagtcgcagcagatcttgatacacttctaagaaacgccagtattgagcctccgtttatcattgtcgcccactcatggggaggctacacttctcgcgagtttctggaactcaggcccaatgatgtcgtgggcatggtgttcgtggattgcaatactgaacgtttatttgacagtggtgcgtggggttgggacgttttcggtccagtcctcggtgaccaagactttgttgaaaccaccggtcttgcaacgtcccatgtcctatccgaggaggagtggaaagccgtcagagaccagcaggctaatccccgacatggacctaccgaggctgctgagttgcaggcggtgccgaataacagacgggcattggcccacaagaatcaacttgaaaagctacttctcaaggattatccggtcagtgtcatcattgcggatacacctaaagatttccagaaaatgtatgactttggagtggccgcaggcaatggaaccgaacaagaacgagctctgtttcgaaaatgtctcgatagatggcgcgagatgaatgaggactggcaaagagatcttttgaggctttctcgtctcagcagatctgttcgtctgcattgcagtcacaatgtgcagcttttacaaccacagagcatagttcaagaaatacagtggaccatagacagctgcagataaccctcaatctgctaataaagccttgagctcccggcttgcaaatcggaccctccaatgatgtgaccttggcttttgatccttaataaagaatttggagcctcgaaggaatggtgcgtggttgcgaccgggcaggtgcgtccgaatattgctggtggagggccattttcagcgtcaggaagtgccagtttcggccgtcccagcacaaatggtttctgtttagggggtaaattgtctattttgattattttgtctcgtgcaattagtttatagccaattcctgctgtgtgaaccccggttattgtctgctttcttctaactgtattcgagtttataatattctaagattgtatgtttgtcgaagtatacgccttgttcgggtcaacagcacaaaatttgacggagtctttttcccgatgttacacaaagaaccttttgcattgtattgttggctataaacatcagcaccatagcattatgtcttaaccacctccagagttcgcaggacgactttggtaattgaaccagtggttgacatcatacattctttcccccttcagaagacccgtaagattgcgatacagtttgacggccatgctgattttgctttctcctcccttcgcgccactgtggctgcgtcacgtacaggaggaattctgtcaagtgatccaacgtgcaggacaaaaaagaacggcgcacagacgatatctccgaaccctcagcgagccaaacccaagaaagttagccatcacctagggcttgtgtgaatctgaccatttctaggcgccgagggatggcgattggcagacgataaagccgagccagagagctaaacgccaatttctgccgatcaacgctgttgcgcagtcaaaagtggctgccgcagctcgaccggtccttgtctcaagctgccccgcattaacttgcagggatggaggattacctctaaacccaatacccaatatggcgggtcttgctgtgccgcacagttccctgcgtgccgcgctcggattcgctacgctttcgcactatacaatggatatcgtcaccatcccggacacgccgctacagcatagtctcctgcgcaggatttttggaccacttgacatgtcgacttcggttacagctcggtgatccactctttggtgatttgtctgcgcgatatgcaaggcagacccctgctatcaccaacacatctatgatcctggagacctcgaatagtgtctgaggactttgcggcgtatgggcttgcttatcctcggctgtgctcgccggccttgggagtcaagagcctcagaattctcatgggagtgtctccatgtcttccgagccaatgaccatcctcgtttgggatagtctgtcacattcgaccacgttgatggacagggatactgcgctttctttgtttttctctttgagggttgttgcgtggcacctggacaaagaaagcatcgggtgacctatccgagagccagcatcctaataattctccactatggaaaataccaaggtgcaatcctggccacagaaaaggaacttatctgaatggtggacccaagtgaggctgctctggagcttggaaacaatttccaattccttttcggtttctcgggcggcgatcgcagcttgtgcctttgtggtttgacctttggagtgtacgggaagcacgggaagtactattcccgttatctcgtgcctgcccttttctctgccctttttccctgcgtcggggtcaatatctatgccgccaacagcgtctacatgcaaatacgagatgcaagctttgcattggccaactgtagaatcagccactgtgcggctctcgggcatcaacagacaacataccatgatttttaactttcagtcgattccagtcacattcttttcagttgcatgcattgctctcggacaaaagagcgcagcatctttacgagacatggccctgtgttccccggagaccgccgtagccatgcccgaggtcagaatttgttttcgggtgccaaccactaaaccccagatcttaccacaagatcccccattagtggatgtctgtgcgctgtgcgatgatgctgatcctatgagacggtactaggattaaacggcgcggccttgtcgagacatcaccccttccttttcctcctgcggcacctcccattgaggctccaaatcccccccccctctttgcgatctgagcactcacctttcactaagcgctgttgggtgggaaaaaaaaaaacctggcaaatccaaagatcgatttccagccggaaaggtcggagatacaattattttgcgcagtcgaaatgaggacaaagacatgaaaagcattgtgtctcttcaatggcccctgattatttaaagcgggcgccagggaagccagttccatggttcagtgtacccgcttccgtccatgggtcgggagaactctgtgagtctaccaaagtccaccgtgtgggaaaatacgctgctcttcgaattccgtagcccctcttttgatttctggaggggacgcctgtcttctctcttttcttttcgccatgtccgctccaacgggccaattccacaggctgtccattggtcgaaatatgccagatacggccttgcctactagaacggcccgcacggggcggtcggactcttccagcgacgaaagtgatcatggagaggctgatagctcttcggagagctctagcgatggagaagaaggggacgagggtgagggcgaagaaagcagcggtgacgaaccgtccgaatcgaacagcgcctccgtcctcgcaacatccggcatcacctatgatctcagtcaactagattccgaggctgaagccagggcctttgtgggcttgaccggccatttcgatgttgtcaactgtcgctctacccccgccgggtatgacttccagctgtcggatcggccacaggtgcacatcggcgcggactcgtctacctgcacttgcgcggccttccaggatcgaccggacggcgcgtgccagcacatctttgtgagtgtgcctttttgggaaaagaagcttaaaacttgaagggcttgaactgccgatactaatccccatcccctgaacagtggctcgtcgatcaactgcacggctgcttcctccccatgcctcggtctacggaggtggcactgactccagatggacgtccggaccgtctccctcgcattgaggaccttttgcaggggaatctgatgtcggttgcaacgcagctcaaatggccgtaccaacgggacgaggaggacggcatgacgcggacagaaaaggtccgggacattttctctgcgttcagcaaccggactctcccagaagacactcgccgggacttgacagagacaaccgagcaagcacgaaccgcagagcagtgcgtggtgcaaggggatttcgaagcgaccatgttccgactcgcagtgcacgatgacggggttttcaacagcctatgcaaggcgatgcccgccggcgcgtgtgcggccatctacttcgacaaaatacaagagcagtcacgccgactactgagcgacttcgaccgatactgtgcaaccggtgagttgccggcgaaccccgtggtcccaggtttgggtgtagaggtcaacgacgttgtaacccatctccagcgttctgtgtcccgcattgcagccaacatcaccgcacgcgcccctcacggctctgaaagcgcggccgaagccctggtgtctcttctagagtcagtcgtggctcgcaataatgatcccctcgaaggcaatccccagggtcgccggtctttccacggcgaggacgaggaccagcgcaatctgtatcacttgctcatcgggtcggtcgaaacagactccgaaacagacgcgcggcactttgtccttcacgcgcttgatgccctgccgccggtggacctccaccagtgcgccaaccgcctgcgcgatatcctccgcaagatcgaagtcaaccgtgctccgaagccatatcttctccatctaggctcgttgatccgtaccggcgaatcagccgccaccactgcgatgggatctggacaaaagcgaccggcggctgggaatgggaattctgggggttcaaaacgaacccgctgattcgttctcaatctttttttatacatatgtttgttatattgttctgggaggccatcgtgttcattcattgcgataccccgctgcatcgtgtctttgcgtttcatcagcgacggatcgcttcaggtctattttgcttctcggtcatggcaatcatttacgtgtttgatgtctactatctaatatacgatcataagagctgctagcattgctatagccattggcatatacaatgaccctcacagacagcgcagacaaagtttccaatccaccagagctaccaatgtctataaccatgtaaaatgcaaaatgcaaaatgcaagtctcatgagaaagatgtcgtcattcccagtcagcacggccttgggaccccacgtctaccgtgagccgggtgtcaccgctgccacgggcagggattagttagcccgatttccaatgccgaaccatggtacaactctcggtagcgtgtgggtcgcccacactttgaaaaactctcaattttcttcttcgggcgcccagcaaaagcacgcgaatcagcgcaaagaccgaaataaaccttgcaaataccgagatcaagatcggaacgcatccatggaaacgtagatctgagatccagatccgttcgatcgcttcgcacatctacgcgtacattttgggggacggatattggatatcactacggggaccactcaatttcaatttcaatttcaattcaatctcaatgtgcccctcaatccaacgcccaatgcaccagttaatttcgataacactcaccaataacgtgtctcgaaaatgcggtgtcctctatgctcatcgtacgattaggcatacatgcccatgcgatatttggcggtgagggtttattaggcactcagaagtggatattacgagtgatatagtcgttgcagagcaaagcgactgattctaacttctaatgctgcgcaaagcccctcttactggcttattggcttcacagcaacccctcagctacaactcctctgcttttgtcataattcagccgaaacttgtccacgtgaccttgcccggtcacctgacgctgcattaaaacgctattatttcagccccattaggagaaaccatggacacgtgacacgtacgtaagatcttctgatttatacttgcttcgcttcgctccgcaatcatgccatgtcgatgttttcgacagggattgatgcccaggtgtgcgactaggaccggctaggaggtgtttagaccgtggatgccaatttttgggcccgtgcacacggtttgggggctagtgcttagggctgtgtttagctttggggtggacctacagggatgttgtataacttgacaatggtattgtatgccggatctacatatctgtatcacgatacaatgtcggccatgagaaggtgtaagatcgttttcttggccgatttatctttgagcaatcgggtttgggaaatattattgtagtaaatcactgagagtatgaaaaactccctgtagtatcaatcatttgcacaagactaatccgaggagtccctcttcaataatctgagtattaatcccttcaaagtatccaaatgatcttcgtggggatcttctgaagatctgaaaatctgaaaatctgcgtcccgttcaagtagaagccccaggcaagagggtcttactacgaggtgctgaatgagcgttcgcctcgaggtcagggtagtgaagactgttacaaatatagccgcgaaacgccgctagaataattgggatagatgatagacaatattttatgcggatggctttgatttttgaacgcatgtgtcttcgataggaagtcagctcttgagagtttgcatggctttgctaccttctcaaggttgcttgacttggccatgatattactcaagagtgattatgagacgcatgatgcatcgtctgaacaggtatgtacctgggtacatagtggaaggcgagaatggtgattggatagatgataaaaaaccaataagtatccgttggttaagtatcaaagtcagtggggcacgagaaaggatacccagtggcctagttggtaactctatcgaacagtacctgctctaaactaccctctaggtcatgtcgagaattacgcactcacggatctgggttcgtttgtccactttttttatactttttttttctctctccctacttctgttatatgataacagttttttgctcttcgtacgctttcaattttgcagatgacattcagcattctatcgaggcatccactgtatgtcaacaacatgaactccagtatcaaaatgcgcgtcattcatactattggccttggcctgggcgttctttgaaatctccagtgtagatcattgcatagtcgccagatggtcatgtatatcaacgaagttgttccgatccatcgtctcttcgtctccaattaactattctttctctatgtcttgatattcttctttaaaaggtccatttgtcccaaatttaactggccagactgccattttgcttataaagcacactttttctctttcatcaacaaggccggctggcccaatggcaaggcgcttgactacgaatcaagagattgcaggttcgatccctgcgtcggtcacttctttttttgcccatttctttttattcgtctctcgttttgacctttcttttccaatttttgatgtgcaaaatattatagagtgaatataaattgttctcggcatttttggcgaaaaaaactcactcaattggtgcaaaatatcaattatcgaatatagcggttagccgttatatatcctagccataacaccagtcaacaaaccaactttactaggaacgaacgaaaggttcctataacaagatgaaaccagattcatatatacagcattcatccagaaagatccaacacaacccgaccctgcatcttcccctcctcgagctccttgaacaccccagtcaaagcatccatcttctctatccgataatgcaccttaatgacacccctggcagcaaactccatagtctcaatcgcctccttccgactcccaaccgccgacccggtaatagtccactgctggccaaccatcgcagacgggaacgccgtcgcaatagcctgcgggtcatgttccggaatgcccacgcagaccagcgtaccattgaaacgcaacaacgacagcgcctgcgcatacgccgcattcacagccgtacagacaatcgccgcgtgagcgcccagtccatctgccagcgaatgaacgtgcttcgtcagcgcggcgccactatcgtccctcgggaactgcgtgatatccacgaaatgctctgccccagattccttgacgagtccctctttgctgccgtagtcgatgctgattacgcgcaggcccattccccggctcgcgagctgtactgcaaggtggcctagcccgccgccggcaccggagattatcacccactgtccgggccgcgcgttgctacgtttcagtgcggagtatactgttacgccggcgcagagcagtggtgctgccgaggcggagtcgagaccgtctgggataggggttacgtagtttgcgggtcctaatgtgtattgctggaatgttcctggggtatagtagccggagactttctagttgaagcacagtccgtcggagctggcttggcagggttctggatggggggttgttaagttcgaggtgtatatttgggttgttgaggaaagtaaatggtatcgtacggcagtgcccacatgcactggaaacccatttgacaccgactcgatcgccgatctttaggtttgaggattcggtgtctgcaccgagtttgactaccttgccgacaccttcgtggccgcccacttggcctggctgagttgggtgtgggaacgcgcttcactgggtggtattagtaagtacccgagacagagagggtaggatagttatgtgcatactctgttggtcatgatactaaagtccgagtggcacacgccggaatgtgttctatcatcgtcagtactattctagcattgaaatcaagataagaagtacaaattaatgagaacctcgcccgtaccaggctctgggacatctagttccacaatctttgtcgaaaccgtcccaggctggtcgtaaataatggccttctgattggtggggatttcaggagcggccattatgactgattaccggtgacaggttgaaaggaggccagatgttgaactacgaagttaatctcaactgaatttcaagcgtcggagaggtgtctatagagaagatgcttaattgaatgctggaaatggtcttgaatagattgtctcattttgtcaagtagaaaaagaggagaatagcgaagagggtcctgtgatcgaatagcggggtttgggacttttggatcgacggatcaaaggcacacgctggctgtgcatgccgaggaagctggctatccaggcagtcattatgatagtgtttctttgtgctgggatgaagtgaggggtgaaacgcggagccatggaaggacctcggttccataagctgcatacatctgcatccattgctggaatgaacaataaagtcagaggagtggattgtagagagatccaagacgtggaatgttgggagtttatatacattggagaatccccaaggtcctcatccatttgataacattagaaacgtgctatacctcttttcggtttatcttggagaagtgattgcactcaaattatgaacaatacatgtggactaagtatttttattggctaaaatggtgatgatatttttataaagtgcttggcctgaaagtagcagcaaccatcctttgtatctattctgaacctgaaaactgtacatcaacgccccatatttaatggcgcctcgcaaagcctatttaccctgccttgtgtaatttatattgtggacccagtacacattggtaagagggatcaaagaggcttggattgctaactcgtgtttgtacatcaggcagaagggccgaaactgttatattaaagcacagaccacataaaaagggttcccatacaaagattgtttatcggggcgtatccttgaccctggattaggtattcgctggctacagcatcggtgccagcgagcgggacgttccacgtatacgtgtaaccactctgagattgaggcgcgacaccgatagaggaccacgaccactccgcattagatttggatttagaattccaagtgccagtatattcgtaaaacccagagtaaaaggcattgccttcgacaaggtagttgacgatctggtgcaactgggtacctagactgtccaagcctggcttgtccatcggccacccgtggacgggtgttgggttaaatgagtattgatcatcttggttgatgccgatgaatagccgcacaaatgcgtatggtaccaggacgtcggctttgtagacaacggtgtcaccattctgtgtatagctaacattggtgattggaccgtcggacggtaggcttttcgtgctcgccgagatcgtccgggaggagccaccgccactacctgaagctaagaccgtccgtacctcgaaggagataccagaggatccagggtcgagcatgccgaccgtagctcgggtcaatgaggctggcagttccagtaccagtgcaccgtccttatatactgcgtagccaagagcattcgaaactgatgaccaggtgagtgtgacggagctatagtccgaagaggagatggcgacatcacttggaagaccagcaacgtgggagctagtagctttagctgggttaccaatgagaggcgtgccacctggtacggcgccgatgagtgcttgcatataagcctcgctgggtagattgtcgtaagggttgggttggtcatcatcggtaatttccagtaagcctgcatggcggctcgaggcaagagcagcaacagtcgcaacctgatcctgtggaactttgtagatgatgtgccatagctttcggggatcctttggcgtccaatcattaggcacatacgagcttatataagtctcgtagctgctctcgaacgtcaacagcgtatccatagtgttttcaaaacattgagctattggagagcccgggttgagtactgtgaatgcgccggggtatttgttcttcgtatatttgttgatgtatgcgtacagatcggcgtagatattgttgggaccgcattctggccagccttcatcaaaaaagataccgccgagactggtcccatagagctcgaaccacttgtcgacatcttgttcgatttgcgaagcccagtctgcgaggtctttcgagcctagtcgagtggtaaattgttgttgactcacgccaagatagccagtccgaacataaccaaggatctttttgccttgactcgcagcttgatcaatcaccgatttccaggcttcatcgaccacataatctggaccgttcaaaacattggcaaccaatatgctgagtttctgagtgtcgtatgcgaagattcgttcccacgaagccgggtctcctagggggttgatatacgacgccaccgcgatttgttctaaacgcacgtacaccgtattagttttgttttatttgaagtagcaagccaattgtacgtacggcggtttggagcattcgagtcgtttgatccactcgagccggagtaagaacatgagttgtaggagaacttctccggtatttccggaagcccattgtcctgctcgttcttattggccatttcataaatgaccagtgaggcaatgatctgatgaagtaagggctggggatggaacacccggccatacctatttatcaatcatttgtcagtgaaatattctagcccctttcgccaagctggatcaatttcttacccgtccggtaggaggtttgggatctctcttttttcagaatctgtggcacttggtgccaccttggagacggcaagagacttgattgaagcaacagtttcgtcggagatcatagattgatctgacaacttggcgttgggatctaaccaaagtgtaatctgcgcgagctcgttgacagaaccctcaaaggttccatcctcaacttcatccacgcttcgtttccagggattagagcccccgaggtcaaaagtattgagctcgtagaacatgagaccggttcttttctagtcgtcaatggtatactatacaagtggtaggcaagaactcaccttgtggtgctttcaaccgttgattcgtcgacgccatcttcacaaaagcggccattgaaatggcccacgtaggaatcgtagttgacaaacttgacttgggaacctgctctctctactgcagccgcctgtagaacaactgaagttagtcaaacctagaccagaaaaaggtaggggcatcaagaccaacaatctgtgcgttgacatcatcgacaagttcattcatgacttttcgatgatcggtggtgagtttccccgaatcctggctgacgattagtgccatgccaaacgtggatttatgatgctactcacccgagtccaaattgaccagctaacatcatcacacgcggatgttagatcttcggcgaagaatttggcgtaactttaatactgtcagcaatgcaaaacgaagcaaatgtcatgacacttacccagtgtagtagatcatcccactatcttcagttagccttgaaacctgaaatatggagcatttttactgactctgaagctagcttcaactttgccgccgtgatgacagtgtccaagctcttgccgaaggcatcgtcggcaatcatttcttgtgtacgggccaattgcccagcgcagcccagagccaaattttcccagttgaaggaatccttccaaaaaaaggtcgtctcattggcggccagacgtgccacatccacttcgtctggggtaaatgaagcccatcggaagatacaatggttcaggatattcgagagctcaacatcattgccacctaggtcatcactcctgttagtacagttcatgaggtagacttgggtgatatatttaccggctgatagcaatataacctgttggtccgcgttgagtgccggaatttgcttttcgaggacatcggatgtgactgccccagagcatgactcaaattgaaaagtgcgtgctgcttgatctcccagccgttcatcggtatggatgagataaggatacgcattatcataacgactgcatgcccagtcttttcaccgggaaagaatatctgtcagtaaatgtccttcaatcctaagccagggagagatcaataccaccgtaagatccaagccggccaccagcgccaattccagccgagtaggaatcgccgatggcggccatttttgtgatgaaggaaaggtctgccgggtcgaattcatcagtagtatctctcccaaacaaatgttcagtgttcaggcttgcattccctagtacttcccggtacccaagagggtttgcgagagtataacttcctagggtagcaatagccaccaggctatgccatgatggtttgagcatgtcgaacttagaaggccagaagccgatgagaaatggagagaagatgatgaaaatgggcagaaagacaatgagaaataggaaaaggaaacaggatattgcgaagactcaaagccactagaagcttcaagcgctgtaagagacttcttatacccatgctttttagtgtggtatcatacgccctcacggcttcgccacccaatctcaaagttattactagttctgtcctcactatcactatggcatcccaaatcggcacgcaaaccgcggcaaatatggttcaaatacttggcgcataaggcacgcggataggcccggataggcccgtttagtggatactcgcgtaaaagccgatatacataactaccaagcttcctaccctttttgttttctctctttcattattcgtgtacttcgtaatagtctatcatgttggtcttatccttctccttccatctttgatctttgatcttttcttgaacttgactctcacaggtatcaacatgtgccaggttagcccctgacggcgccataacgcgctagtgctagttagattagcattaaatgcctccgtcgctactccgtactgtatccacaaccttagcgctcagacttttccctagcgctccaactttgactttttcctggaagaagcggccccaatgtcgatacgcatgaagcaataagtccgtctcaagctcataaaagcattcttggcgcgggtttccgacatggtgccaatctccgaacgatcacaagtagtatcaatactggaccctgtagctccatcagctgatcgatgtgcttcctctatacggaactattcgttagtttgtccatattagcattttaaggcgtgatccatcggcttgtcgacattactttggatattggagctcttgctacaaatggtaatactctatcttgccgctggaacccttccggcaatcttccggcaatgcaacactcggaccctttcagtgggccaagaaagaacctccctcgccttcatttcaggactagcctcgcatgttagctcgaatccaggctgtgtttatcgaagaaaaattcatatggaccacagcacagaaaatgagatgtaaccatccgagacattctcatcggagtacagtctagtatagagtcgtatagcagtaatactagtgctattccgccactagtgtatagtgggactggtccttcaaacagaacaagagactagcaggcacagcacagtccaaagcggcgatgcttcgaagacttgctggacctcataatagtcagtcgcacactttattggaatcaataattccacctttcactcttggtagcttggatactagctattttaacttgataaggaatgtactatgtggcctaagtacggagtacagaaatgcaaatgtagcgttccgagacatttggctttggccctagcgtctagcatatacgccgcttcgtataataacatatagttattcgcgcaatttaaatcttgtcctagattgagaggtccgagtcttggctgatctaaaaggaagatattcggattttctaagcgacaaattgaagccattattttcactagttagactcatttgtaattgaaattagacctattgtacatcggccagacaaccctttataaggatagactagcctctgccgctcagagatatgtttctgggaacaacaggtacttcttggagtttcatcgttcactgtgcatgagtatatgaaaagcctagctttcaagtcaagaaatcatactccgagccgttgtccatttccattgtcgcggtgtaattaacgccttccttcaaccggagcttgacatggtggctaatgtatttgaaatttctagatccccgtcggtcacactcaaattgagtgcccgcttcaacgatgctcttcccactcgtccgaaagatcggtcttttggcctttggggccttggtcgtggtcaaccctgcacttggagcaaaacagcccaagctaggtagttacgacctgacggaagccaaaatgccgcttggcccgctcaaagttaccctagactatagcctcgcaacaacttggccgacgccgctggatctcaatgggccaaaggtcaagcgcaattggcaatttagcacccacatggtgttcgcgaattccgttgatgaaatatcggacgggcagctctggcaaatagcacgagatgcggttgatgagatgattgctgaccgaagccaatatctcatcgggcccatggcacaacctaacgccatgggaattctggcctggggcaatgagatcatacttgcgtcttctatgaagggagcaggttctttctcctatgactttcttggaggtgacaacccggtcggcagaagactagagatgtgccagatgctctgggggggagactggtcgactacccataagaacaatggtaattgcgcagaggaattcgcggccttcttataccacagacaaaacgaagttgaactgaaaggacaaaacccgagagttggcacctgggtcgcgggaaaagcttggaaacagatagatccatgtggaactggtgatgcggtaagtaattagtgttcttaggagcttatgcttcatgaagattaactgacaaatgtataggacatttgggggtgcaatcttttcgtccagggtgagggaatgagggtaatggatactgaaacagcaccggaaccttacacgttggccagccttgctggaggcccgacccgtcaggagcaaattcagtcatgcgggggtgatcctagagtattctttccgtagaaaaagattatagtgaatgggggtaggctcgaagggatattgttgacagaaggacttgtattagttatatatggggggcctgcctgatcttttcaggattccactgaccgccttatataccactttcgtgttacccaataatcgaaaagtaactatgatgtgatgtgcaatttggaaggtcaagaagtctcaaagtccacaatctaataagttgcaggcttttaaatacaaaaggggaatctcgcttctgtgttggggatcccaataatattgggaacgcacaacaacaaagtgagcagagattctatccaggacaagggaaaggaccggggtcaaacgcccaattgtctgatggcgtcaatcgccaagacgtttggaaagccaagcctggatttcaacacagacctgagtccctgactggttctgcttcagttattcgaacctgaattcccgactggtgacctatgtcttcgagaccctgtaacaacgcaaggtcccatatccccaattctttcgctaacagacgaaacccttggagacgaggagtgaacgtctcccattcttgtagccatggtcgaatagcttctaacaagtatgtacattcccattcccattcccattcttcttggagacatagtctgtccgtgacagtcagccattgaaggcttcttggaaggcattcctctaggcgagccacattaggcgtagactgagaaaatccaagcagaaaggcaattggaacttctagactttgcagcatatggagttcgctaaaagttttgaacgaccccctaaaccgaacctccgggtattcgggggctgattctgagagggatgtccctgccgtaatagtcaaatctgttaaagaattttgaacgtgggatagacccgcggctaattgatccaaatcaatgatatcggtgacatattcatcttgaagatctcgccgaaagtaccaatcccatttcaattttcgaaggtttggggtgattgatagtacttgggcgagaggcccctcacgtagcattgtcaaatcgagcgatacgagtttggatgcgtttggtagggttttcccgggccatttgaaagttggcgggttatcaaccaagacccttatccgttcaacagacggtaggtagaagagagggaggacatctgcagtatttctagcgtctgtatacttgcgtatgaagaagccaacgccgggaaatatagcctcgacatcttggagatatgaaaaggaattgagatgactatttttctcacagagggccgaacgaagcatcatacccataaggcgactctctcgggtgaagttttggctgagctggagagatttcagacatcggagctgtgataataagagtgacatgaacgcgtccactgttccggcgcgtaactcttggatccattcactggcaaatgaaacggagagattttcgatacagttcacgagcccatccaaaggaacttcaccaagtggaagtttcggactacttatcttgtagtcatagaagtattcatcgaagctatccccactaaggattagaacatgaatagaacttgcgagctcgggccttcgcacgatattatgcaaaaactgagcgatcggaggggtttgagattttgtccatgtcaattcgacgcgattgtagagaaatgactcagcaaccgcgcgcaagtccctatgcgtaagagatagtgcgtagagatcgctgcgcgataaagttgcaaatacgaggcgcaacagctctgtagggatggtgagaatagaggccgccatttgatgatttccgactgctatttcaaagagcccaagagtgatatctcgttgcctgttacaagtagggtgtagccctaagtactctagacccaatcaggaaacgacgacatacttctgtatgatcagctattcccccataaaagcggcggcagctaaaataggaaagccccaccctacgaagacccatagcgctcagggttcaaaactcctttcccacccggcagatagagtcacctatatcttatacttggggatattatgtccattgatctaagttgttaacactgattctcttatatgcacatgagaacgaatcaatcttatcgcaaaaaaaccacaaaatgccaagttcacgcataggatgcccagcctatttaaaattagtaaagcgtgatggtgaaattggcgcaaaggaaagagtatacataccgcaatacaacacagcaaggttcttctcatcacttgcctgctgaaccaattcattgacagtagccgtgacactgagggttttgctcagttttttcgccaccactgtcaacgcacggtcagcttcactaggttcattctcgttcccactctttgagacgagaccatcagctgccccaggcagagctgcaggcccatcactggcttgtttgtcctgcatttgcattttcttcacccgaaatggggagacagtccagctatacaacgggtcataccgtaatacatcgaggatcgtcattatgctgtacgattcttgccgaagtgcttcaagggtaaattcacaacaacgccggaaaacgccctcagtcttggtgataccgaatccatcgactacgtcgcgcgtcaaccggaacggtacaacttcaggaacaggaagcacacgtccttgttcgaacgctacaccgagatcaatgtgcaccacttccccggtcttctcatctagcagaatattatgtccgtgacgatcgccgagtccgagaacatgaccgaggatagagattgcagcggtgcttcgtgtgtaggctaaccgcttgctaaaccagtcgtctgggttgttgaacttctccatgaagaaatacttcaagactgggtggaagtgctcagtcacctgtcggtaggttctgatgcgttgctcaaaagatttagtctgtacatcggcaatgtgtttccggcaagagttgggtttcatgtccttcgggaagtatttctgatgtgctggcattaggtagtcgtgcagaggaatcgtgttcggaacgaactcaatgattcctgcgcttggtgtcaatggaagaaccttgtatgttcggatgcctaggctccgctggcgtgtaggttgatggtctttcaaaagactgctgacttgctcaaatacttgctccatgatggcatcttgccgcaggtcatcatttcctcccttgaactattgctttgttagtttaagaacgtcgacggacttcaaaaaaatagaaagcttactaattgcttgtagcacttgccgtcggatgcagaggcggacagaatttttggcgcgctaacgccggaagcaatcgtgaactctgagtagaaccttgtgattgtaggaacgtgactataatcgcaatctgcacggaggctgattttcattgtcggtggtggcagtttgtaagtgaccgcatcttgtccaaggcgttggccagtagtcaagcttcccagtgggaccttagcaccacttttgtatttgccgtctagtttatcgattgcaaatcgcacatagctgatgttcacattatgcacagcaatccaagtctgaccaatgtgactatcgttctttagacgatccacaagctgatttgcggcacggaaacgcgagtgagacgactgatctttccctcccttggacttgctgctagcgaaaatttggtacatgccatggaaaggatgctcaacacatatcctgtataccaattgagtgagtaatgtctggaaatcatcggagacatcgagtaggcgagatgatagctggttcatcaatggtgcaaattttcggctaggaactccgtccagataccgagagacagctgaatttgcagtctcattatctgatttatcaagccagagtgcacagaaacgtagagcatcattgttgtaagtatcgctttccctcaaactgagaaggtaattttcgaggcactgctgtaggaaagcctcccgacttcgcaacaaacgttgatattcgcggtcgtcaaggtcgaaccattgctttgccttggcccgataattcttcaagtattctctctccttgcctgtggcattcttcatcatgtcttccaggccaaggacttctttctccttgcggtcacgcagttgttccactctcttgaaatcttcgaatccatcagggtttagtagctgctgatcacaaaatgttgcaaagccgtgatagacacgtccagcttcttctccgtcggagtttcctttcaattccttgaccgcgggatataggtactcttgtagaattgagtcaggcttttccaagcgtgcctcggcaacgtggtgaccctaaacatgatattagcacttcggatagaaaggactttttggaaagactccctttaggagtctttcaaggactcttctaagaccaacttaccaaagtcactagaagttcagcccgactgagggggattgactgtttatgaaggtcattctggcccttcagttgctggagcatgcgaatggacgcggtcatctctccttgatcccacagaacgttggcaagatcgaattttgcagctccgtcaatgttcattcctaacgctgcgcacggttcggcaagcttcgaaaggctcattgcagatttgagcgatgcctgggagataccatgagttcttgtgatttccaaggattgtcgaatgactttcgcttctagaagtcgcgaatttccgagactcagatttgcccgtgatttgaggatgtcatttttcctgactgaggagaacaacgcctcatgccaagacaagatttctccaacttcatgatagctgctctagtcagtacatatcttgtaaatggttttgccaagggaaacacgcacctctcggttttcaaccagttgcttctcgccatgatattttgccactcttcctccacattctcggaaaacgcggagtgcaaagtgtcgctgatttcagttataattcccaacgcgcgcattgagcttcgcaactgaatagcagacccactggtcttgagaagagaacccagtgttgtcaacagaccactttcaattgagccattgacctcgagcagagaacccgaggtattgagactttggaatgtacggaatacagtcgcagatggggaagaatccgaaggcgatactggaatatcccatttttgaagattagttgcagcttgcaacatgctgtcaaaggcaacaggggcgtcgtttgcactgccggacgcagagagcatcgtattggcaatgccctggaggttggtagcatttaaagccttcaacacgccatatgattctgcattgtcagacatctgaatttcactgtcatattttgcactctggaataagagatttttgaacccggagctttcgtactctagccgttccatgacactgctcaaagatgagctctgctgaatgccatagaacaagtccggatcatcgatgtttttgaaaacatcatgcagaaaagcaggcggtggctcgtatctaacgacagatgagcgacgagatgtggaaacaacctgggatgtttgtatttccaggaaaagaagcgaagtcttatgcaaaccgcagcgatgtgcagctaaagatgcctctctgaagtcaatatcaagccatttgtcccgctggactatagttgattcatctggcacgggttggtttcgaaggtagagaatgcagtcgatcacaagctgagcgtgaggtaatgtttcctcgccaatctcacagagtacccgccgaaaagtagcagatatgtcttctcggaccttcccatttttgtctttatcatccttctctgactgcaaaacatcgtgaaccacgtatggcaacaactgcgctgctaagccaggagtcacgttgagaatttcgcgaagagagccaatgactgggtcttctggagcagcattagataagaacagggaaacattgcgagcccagtcagcaaccgacagcccggagacgctggttgctgcattttcacatctctcctgctccgagtttgaaagcaaaatggtgggacatgtgtatgggtcccagacgagggcaccaagcagagatatgggaatcaccctgctacaaccttcgtaatctggataatcatcgaccttgcttacgatcagccgcaaagtacgctcaatcaggccagcttcaaaatgcttttgcacgtccagcatttcgcaaagtaccatgagaattcgggccttagaatgacagaaaatatccttaggcaatggataagactcgttccattcaaatagtgagagatcctgttctcgcaggagcaattgatcgattttcccagtggcagcaaaggatcttccaatgacctgagcggcccaaagtcgatattgagggcctccattggagttttgaagtgtgtgccataaagatacaacatgggaagcgggatccacgccttcatttgacacccaattcccagtgtcggatgcctgctcgaattggggacataggagcgacagaataagatctgccagaggcttgctcaacagcgcagcccctttagagtcgaggtctttgagaattgcaaagaccaagtccttcccaacctgtccgaccgaagagtcctcacaagttgagaatttctcagcttgtgaaacaagccgatcaaatgatatttttggcacttcatggaaaagatgatcggaacggacctccttaataaactcaaccagccattggtggaatctttttgcatttgactgcactgttctgtactgactctcctgagtcgtgttctcaggtaacgacgaaaatattccgcggagagtaaccattgtcgagacagcgatacctgcagagaaatcgggtgcagataagaggtatcctttccctgcctcgagtagataccagaaaaccccaagagcatcctcagaacaatgaatgtcgctaaggaaaggccgcaaggagctgagtgtcatctctagaggataatcttgaagtatgacgggaccagccacacagattaagattcttattttgcggatcacagaacaagcatgaagcgaaccgagggcgggatgtatggattcaagcagcgagcggcagacaaaagacgcaagtgatggcgtccatattgattcaaattcaaatccagtgcgtctgcaaagaaattcaatttcatccaggagataccgtgtccgaaaggagggttgttgatttgctgggagtgcattttgagatgcactcttgttgattatttgtgtctgaatgtcgagcgcataaccgaagttttcacgctttgagaatgctcgttcgatctggtcatagtagtcgagagagttgaaaaaagtcgcaatgattagggggaattgactctcaatttgtgtcatgaactggtctgccccgagaagttttcgcagacggatttcaacccccttgggctggctaccttgccccggaggagtactgatatctcgtgcaatgctgtatgcctcagctttgtagaaagaggtcaccaagagctcgagatgtggaatctggaggtattttgcaagctcaattgtttcctgttccttggcacgcatcatcatttgcccaacgatttcatctttgacgtccatcaacatatcctgaaggctgtcataccgaaatatagtaaatggcatagacatgatactctgtgtctctgtccatgtgtagagtatttgcgacgagaaaagccgaaaaagttgtttcgcgtcttgcagaccgagggtctgcgaaacggagaccatacatctctcggcataccacagtgacattggaacttgagctggggtttcaaatagatggtagatacttctccgcagcaaagtatgccatctagaagccaaccgagaaagcacaaaaaggcggactgcaattccttcgatccattcagggtctcgtggcaagctctccaatacatcatcaaagatggcatcgtggtctttgagaaggaaccgctcaaataaagcagggataaatttcgcaacgctgaatttgacttgaacatcaccttctcgaaggattgtgaataaacttgttcgtggcgacggaagagactgctcattgccatatgaggggcatgtaccaatcaccccctggatgagctcggctaaggcgatgtagacctttggtgtagctcttttccgggccagaagcacttccataaaccaattgtacaagtccatagccgattctttcaaggtatcgtcaaggcctttcgtccaggagccgacaaagctggtcatcatgcggatgcaaacgcaatgtgaagcctcacaccgctccatttcataagactgtagacaattttcacctaaattttccaggatgcagagcagttttgagggctccgattccgagcagagtttgaagatttcaggtaagatagcttgggccgccaagatatcggcttcatctaagcctgccaggtattcaacgacagaggacgagtcaaaatctgcttgggttctaaggaataccgagagttggatggttagacagcgttggtatgtgacggggtcaaggaagatagacagagaatttcggttcaaggtaagaatagtgtcatcaatggctattgggggttcggccatgaatcggtcatccacatccataaaatcttcggctgcagatggactttttgagttctggcggaaatactcgagcgtttttgcaagtggagtgacaagttctttaagactagtctggatggcagcgggggtgtcagaactcgttaaaggatcgaggagcggtgacaacaagtctaagcaagattgcatgaaagcggattcgtgtgtatgagctgccagaaaatcgcatatagcgttccacagactccgacagttctggtgcagatcttgtgatcgaggttgagattgcaatgatggaggaagacatgccatgaagagggaaaccacaacacaaaaggacgccagaatctggaagttatccggagtgatatgtgatttttcttcattcatagcgtgccacgtttgtaaaaacgagtcagatctcactcgaaacagatctaagatcgctatatcatcagggtcttgcctagagaattgctccaaggaccatgtttcctgcagactccaggggtttgctggagcaaaattcgtatcaaaaatgtaccccaacaatttgcggttctcgtggaaaaagagccaagtgcgagctatatgccccgttggtcctgtgacttgataacgaggaatggcgaaggatcgattagtgcacgacagaaaaaggtccagtaagtccaaaggacgagcatacgcagcaactcgagctgtctggattcgatcagttaccgaacctgcaaagtgactgtcagccagaaaccgcgaaaggaaaattttagggcctcgtaccggcccaaacttctcttagccagctacatatctgtatcgaggcctgctgggccgacctgggatcaagctgtgtcctcattcgtgcaattgaggcccatagccttaaagacgtgtctgagatagcagatggtccattgacagatgtcaaaagtgaccgcgttgtctccatagctactgagtaatccaataagtctgactgcaaaatcatactcactaggttacacgcagctcgagatgtcaccggagatgagaatgcacgcgtagtaaattcgactactcgtggccagtggaccctaattctaggtgatttggcagtagccccgttcgcaatactattgtcatagtcaatttagggcctttcttcctatcctttctagatgcatttccgaatttacgtaccttgtcagagcaaccattgtccaggatgatacagcaccattaccgccagagatgttcaggacaagctgcttgaagaagggctccttcgtctcgatgtcaacctcagattcgaggaatgggatgagttgcaatgcacatattctttttgtgcctgtggctgagaccgaatctcgaaatacgtcctggatctcagaactgaagcgctgccttttgcttgaggcttcgcgtgctgacccagacttgactcgggtgtgaatacactccgagagctttaatagctctgcaatcaaccagaggactgtccagttatgctctgatctagcagttccgaagcaaggtccatatactggtctggtccggcatgcttcattgtgataaagtgtcgtttcatcaatttgcatgatctccttttctgcccgtctcacgtattcggaatggagtgtactggctaatccctcgatatcatgtgccagagattccgacgggtcttttcgagcagtgtccacgaagacgatcattgacagcatcaaagtggcaagtaactcttctttgagaatctgtaccttagtggcccataggcgtcgaattactggaaccaggcctgacaggaccaaacggacaagttcggattgatcaaacatgacttttgtaacgactgcatttatgctattgaacgcgagctggtgtgtattcccagccacagatgactcaacaaactccgaaagtccgtgaagtatgctttgagccgtagtgtgaagaggagggtttgtgcttgttgtcaacagttgaatacagatcacaacttcttcaatgacatttctattgccactgtgcctttccctgctgactgagacgggcgcgacggtcattcttgagggggtagaacggctgtcactggcatcttggtcttcgggaacgaaacgataaccgcttcgaatactcaattgactctcttcattctcccggggactaatactggcaaggcaaaagctcatgagggctttccagtcttctccgtcaagatgctcggcatgagggcggtaacgtagaagggatgctaaacatttggtatagtctaggcttaggggttcccacagaccttccccagggaccggtagagtctcagtaatgtggtccacaatagcgcggacggttctgattcgcaaatttttcaaaaagaggccaacagccattcggagtacggaagcacatgtcgagagccgcgacgcagaaggagtttttgtgggcttttgggctcgattgtatattgacctctctgctgcgacaaaacggaatagcgattcaaagatcttgtggcaagctttgtcattgagtgtttgtctaggtgtggaagattggttagttactttaatagcctgaagtgttcatttggggtagttgactacttacagcttggagctcttcttgttctgctgtaatatgtgcttcaagtctgtcaattgagttagcgccagttatttctgagatgagataagatataaagcaacctgccaaaccatccgagcgggccttctgtttgtctgatgagagcaggctaatcgttttgtcgagaaagatctcccccatcgcgtcttttttcggggtcttttctcgacataaaacacatcaaagccttgagtctcaacaaatcttctcgcacctgacaagaaaagacatatcagatcaatcagccagtctgcgagctaatgatcgagtcgataagcgaagtgattgtgtttagtggaaagtggagtggcagtatttgcgaaagctgtctaccgcccgatttttgtcgcgttccgcctttctagactctggaacaaacatagagctcgagcttcacttctcaacttcaccccgccgtcatggcagagctccaagatacccggaatggcctccgtggtctgtatcaggatctctcggctctttcgaactctcaactccccaacgtcgatcgcttgtgtttcgaattggagacccatattcaagacttccgcaaactcctagacaagccagcaaagaacaatgccagccgccaagctgttctctcaggtaagtagccacttggtatcttggctacctcgcaaccctttattcgtctgttttgacaagttactaacgtcgaacgcgatatcctagggaagatcactgttgccgacgtcgaatactcggtgaaccaggatttccaacaaggcgcactgcaacttgcagatgcgctcaacatcgatgaactcgaggcagcagttatgtttctgaccgctcaggaaaattcacaagtgttggacaggcccccgttgatcgctgcgataataagcttccacgagcgtcgcctttttaccctcgagtgtctacgtctcatcttccgagaatcgcgcgaaattgaacatgaagcgacccatcctatcatgcacgaaacactggcccacgttctggaaattaaaaacagccctttgcggaatgcctccctctttgcgcggaaagccttgagttctatggccgacatccagaaatggctgtcgcttcttggagatcaagttcaaaaggcctcagtcgttggccaggaaaatgaccgcgatatcatggaagccattgaattccaacgcacaagtctgcaacagcagcatgagtcactcggagcgatcctattctatatgttcaaagggacatacacaagctgcgaagacttccgcatacttgtgagtcagttaaaaaaaattgatcgcttcgacggactcttgtttcactacattccagtcacaattgtgtcttttgtacagcacggttctcccgagggctctggatctgagaaagaggcacgagacctgcataaattaatcactacatccaaggatggccaaggctggaagctatcaaatttccacgctgcccttgttgctctgtggctgtcagtctacagtggatggtactttgatggtcttccatctccatcagtcgacgcagagaaagaatccgaagagcgtacgaagctgttcatgtcttctctcgacgatggcgcccttgattttatgctcgcaatctgctccagtgtcaacaccgaggaatgggcggaccccgcgcggagcgaattagtgacattactgctcagggaaagtgtggtatcattgcctgatcccgaaccatgctctagctttatgaaggagcttttaatggaaaaccttgaggttttcgtggaatcatgcgttgcaaatatgcccgacgcggtgcgacgactgaagtcggaggaggactcacaacgactagaccagatcaccgcactcagagatggcctcacctctaacctccaccgtggcttggtagaggtgcggactcaccttgaatcccttcttatgatcatttcatttgcatttgagcaccgacaagaagccgcccaagagttttgggctgatcctgatgggaatctctatggcttccttcagtgggcgtctaaacgacagactgttcctcgggtcagtgctttttgcgaaatgctgtgttcgatatccgaaggagaagaaaatgcagctgcggcacatcgatttctgtcggaggaagataagtttatgtcttccaagttcaagcgatctacaaccatgaactggtcgcaaatgttcgctgaactgaagctttacgcgtctcgggtcactgagaagccttccactactacaagcccccaaggggcgccagggatctttcgtccacggaaaccagagcccgtggaaatgaacgagcctgaaagcccagtgatgctgacatgttaccttcggctgataggccacttgtgtaagcagagtcgacttatccgagagtggatgctgcaaaacgaatccttcaatgtagttagcacactgctagacctgtgcagtgggccgattccatcgcatcttcgagcaactacctttttaactctctcagcattgatgactgacaaatgctcccccgttggaaaggaaacgtgggcccgtatcgatgggtggctatcgggaggaacaggtgcgtccggaattggcaaagttcctttggtttccaaccctgccgtttggcaccagcaacaagccttgcaaaagatcggggagagctttgaccagacaaatgcatttgttgttcttatcaatgcacttactgctccttcgtccgactcaattgacgacccaatgtcgttgcctttcccggagaccctaggtggaacttatcgcatgtccgggattgagccttacatcgatttcatcttggggcatgccttttcgcggaagattcaagagcttaatgagtatcagtcccgcctgttgaacttcaactgtctagacttcgttgtggcaagcttaaaatccttcaatgaagacctagtgttacttctgagtcagccatccatgtccgattccccgacgcagacttcatcgctgctcacctacgttcgtttgcacccgtttgcacgcgtggtagactggctttttaacgaagatgtactcaaatctttgtttgcaacgtctaaacaagacgtttcggacgttgctaccgcgtcgcccgactctgttctggttctaactttgcaccggagtctggaggttatgaacttactcgtggacctgcaatcgacatactttaacattgtcaaacctctggtgcattcccagcccgtaccttcccggaccatcgtggcaaactcctcgctagcttcatttgaggacaccgtgctgaacaatctgacactcatcccgtcactctgtctctattgcggcacagcgcatgaacaactcaccgtcatttccatggctttgctggaaaagcttactagttccagaaagctcaacaagatgacttcgccagaactcgtcaagtggcaatcttcgaacaagattgtagaggtgcttgcatccgaggtcgatgtggacagcatatcgctgcctcttgtgttacaaatggaaccagatattagagagcttgatttcggcccgaatgctgctggctatgtcattcgggaaagccttcttgctctgttgaacacctgcctgggaacgatcacagaccgcccaacggtagcccatctgctgctgggcttcgactgcgtgggcaacatcctcgatgtgtcatcggaagggctattcgcgaatcaaagttccttgctgcatgccattgtgaatttcctgaaggcttatccggagatcctcgatggtggcattatatcttgggtagtgcacctcaaacgtatggcttttgaagtgctgaagcatctatggtcatcgaagctggcaagttactacacccttggtgaaatgcgtgctcaggcattcctgcgtgagatgtttgcctaccaaccgatcattggcccgagcactgcctggaatggattccccattgattcagatgaattttggctcacagacgctgccactgccttagcagaattcctgctttaccggagtcatctcttcacatatgccgcaaccgaggttcgctcgacagcaaaggctagatcaccagctctacatgcccaaattctttcagtgttgcttggaaatacgcttgcggataacggtgaaccgttatctagtccttccgtgttcgatcttttcgatttcgcagaccttgatgttgggcgcgagttcaacatgccccagctttacttgctcggtgatgttgctctccaattagaaagcaagcgggaggagggcgtgtacagtatggaaggggtagaggagatgatacaaatgcggaaagcagaactcacggccaatggaccgctccgcccacatgatgaggagcagttgctagctgaggctaatgacctgaagttgttcatccttgcaacgaagcaaaacagcctgattcaaatcaatcgctatcacgccctccgttcatgggtagagctcgttgctacgatgatcacttgctcttctatcgacgaaggaagcaggccggctttcattctacattcaatccaattgattctacctaagctcacaacggcaatcgaggcggatcttcccgaagcacttgaactggcacgactggctgaattgttgatcggtagacttgcgtccgagccatctgcaacagatgcgtctcgaagcggggatgtcatcgacgaaaagctccaccagctctttcaactctgcatccggggtaccaacctggcgacaggaaatgtgttgttgagagaaacgctttacagtatttgttcccactacataacacgcatcacatcgtcggacaagggccatgaaaacctacgacgtcttagccaacatgtcatcaaagcagccggttctagcctgattgagactatgtgcgatgacgcatatactggtcaagagtcgtgccgtgcatccgctcttgtgctattgaacagtttagctgttctggatcgccaaactgactgtgttttggctgagttcatctcgaggtcgaactatttgagtctattcctggatgccttgcgttctcttcccctcgaacttcacaatgctcagggaagcggtcagtcatacccccttcgaaacagtcatattattacaactaatcaaaactcaagacaccccggcactactggcatactatgagtcgcttttatcattacttcagcggctgtctcaaactaagggtggagcaaattgtgtgctcaactctggtcttttccaagccgtgcacgaatcacgacttttcgctgccgatccagacatcggcattggttagtcaatcatatcctggcccaattgtaccttgctaaccccctcagacattgaaaatcccgacgccctccagaggtattacgatcttctcctttcagtccttcaggtcatcgtgtatgcggttttctctcgaggtatccacaacgaacaaattaaagagcagacccgcatttttttggctgaaaatcggccatgcatggtgggtatcttcaaacgatctgccaagatcggaaatacatcaaccgcccaccacgagactctatgtgaattagttaagactttcatggctcttgttactgccacagatttcatagaggtatgttttctcttcttttcattttttgcaatctattgggtcgaatccgggatcatgtgactgactgagtgtagttcgaggaccaggaagtccaacatatcgcccgaccagcgttgttctcatgagcctttgtccactgatgctcactagggaattgagaagaaatgcatgtatcattatgacccggtggagtgcaggcggttcccaggttgagcgattttaccttgaattcatttgcatcacatctaattcgtcatgtgtaagacgtccgcccatttcgatatctcggccttatgatggctatctttcgtaggaatgagtgctatgttcgctcttgcaaagtaacaaagtcagcactcgagttctgggtcgagcggctatgtttcccagacggagaagctatccgtgggggcgtacctagaaaatccacacccagaatctcgcaatgaagctttgggcgcatctccaaaggtcatgacgatagttctttgggaccattggtctctataagattcatgaaacaatccgatatttgagggggcctgtctcggttactgatctaaggggacaattccatagagtatattcgagtcttactgtatatgatcgacgagattagaaatcggagaaaataatatcataatatccatataagtataacaaccacgcaactgcaactttgatacatttgtagggtgcattcgccagtcttttctagtgtcttctgtgctatcttgttggatgtcttttttgattggggttttttccatctcttagctatcatagagagtgtgacagacacaaaacagccgtagacgagtatacttttccattgaaaggaggatggttcagtcccatgtataacctagccctaactctcgccaatttgatagacccgagttaggtgtacacgtgtatgatcctgaggtacaaattgatctggcatatacatgtgatgtggtattgcactagtagtatgtagtcgtgatatcatggatgctcctgccttggtgaggttggtgagtttctagattgcttgcccagctggtttccatagccaccatccacgatcgtaccttcctgtaaaacttcagcttctgtttaccaacctcatcgtaccttcctgttgctattgtctgttgctagggaatcccccaaatgttatatatttgctccctccactgtttttcttttctctttctcctctccccatgccactggctatttttcatttgcacttgctcttgattaccaaaaccatttcttattgctttcaaagctattcaaaatgcacccctctacctttggtaaacgggttccctcttctcgcatcctgctttctaaaaaccgccctcctcctctgaagtcatgccttgccgcagcggactctgatcgggactcccccccctctggagagccttgcgtccggaagacagtacacttccccgacgacaagtgcttcctcgaacgggtcagggaaatcccgtgtcgaccaaatcggaacaagaaggaactcttcaaaagtggccggctcgcggagacgaagtcattcatcatgtacacttcgaatcctctgggctccaaccagaggttcctctccaagcatcctggaggtagtgggcctcagtacgccacgcagtccccatgggtcagcgttgtacgtgcccgttacctcgctgcgaggtattcgtctgccccacgtgctccgcagtccacaccttcctccgatggagatgtttcagcgcacgagtcttcctttgatatgtcttcactggaggatgccctgcttgagcctacccccagtagctcactgcatgagtcttccttcgacatgtcctccgtgagtcatgcgctgcctgatcctgacgtgactttcgacatgtcctctttggccgatagcctgcctgacaagagtgccttcaatatggcttcgctgatggatgccctgcctaaggttcccccccccggttcaccagatggggttacctctgacatgtcctccctgatgcgtgcactccccgactttgatgctccctctgttgcatcgtcccttgcacgtgcccccaagtccatggctgcgacccactctcgcgagtctcgcaagctagctccaaaggttcatgcgcgtgtggttcagacccgcgtcgtccaggttggcccgttctctgccacctgtttcatcaacctttgtgggctcatggttttgttgggctcgttcttcccatgccttgccccagcattttatgctgcgcttgtgctcctctttatctatgggacgtgcttcttttgatgctgacggtctgcactcatgtcctcagagcgctcggcgggcttggcttcctcttccttcctcttccttctcctttttgttattgttgctttctgggtctgctttcttggcgttttgtttttttctgttgaggcttttgccgtttgattttgcgaaaataaaaaacccccaaaaagattgctttctgtgtctgttcgttggcgttgttggcgttggtgtttttgaattccttttcttgttttgaggtaaggacttggagacatgggggcgacgtctctgtctgtgatcgcgaggaaggcagcagagcgtgtggtggcttcatcttttgtctttcaaggtaaatgatcccactcctcctgtcttttatattattctaacaccacgtcttccagggaggatactggcgaacgtctctgtctgtgaacgtgcggaaggcagcagagcgtgtggtggctcaattggatggcaactatggtcagcccttgtcaaacatctggtgtattcaagagctaacatcacgatcaatttcaggtggttaatgggcattgccatcgaccgaacgtctctgtctacggagagcagcagagcgtgtgctgacttgcttccccccctttaccccactactttcagaaacagcatggttgaactgcaaagtcttcctgcttcgtgtgctgacatcttatagctcggtcaaacgtctctgtctgtgaacatgcggaaggcaacaggacgtatggtggctttgtcttttttcttccaaggtgaatatgtttccacctcgtcgctcttcgttttgactacatactaaccgcatattttcctagggagggcttcggggacatctctgtctgtgaacgtgcggaaggcagcagagcgtgtggtggcttcgtcgtttttcttcaagggtaaatatgatcccactcctcctgtcttctatcttatgctaacaccacgtcttctagggtggatactggcgaacgtctctgtctgtgaacgtgcgaaaggcagcataacgtgtggtggctcgccaaaaagggcgaaaggagtatgttttatacctctgcccatggatttctgtggttgtgctaactgacttagtagtgcccgatggtgtccttctacctctttccttttttccttcttttttcaccatgtgttctcgcagtgcgaggggtatggagaagaaaaaaatgaagtagaagccgagtacatacgtatgttcaaacagtctgtgcgtgtatcaagtacaatcctagaatgtattatgcgtgatcacttggagtcacaatggacttcatgctttggcctttagggtcctttttttcgttatacagtactagtgaaccataggagtccggtattgcgcgagggctcggaatatgaagcgggggtgattcttgcgagcaggctgaaatcatttcttgtcagagacctggggggtgcgagggtatcatgaaatgcatcaattagccaatctttccagccctgctgtacagaatatcttgaaactggtatcactaccaactctaacgcatgcctgccactcctactccctcggacccagcacaaaactgaactccttcaaaaccggcgaacgcttccaccttgcaaagagctgcccattctccaccaagatctgccgtagcacctcccccctctccacctctgtagcaggccatacaccctcccataccatcacatatggctccacgaccccaaagacctcccttagccacctccatgccctcccctcctcaatcctcccagccagcaccatcccccgctctagttcctctagaaaaatatccctctctcgcctctcaaccgcagcccgcatcaccccaagaaacatatacgaccgcactacaaagtccaactcacccacctccgccttcacgcccatcgtctcctccactgcaacagcagctaaaaactttacctcctcctcactcccaacctctccctcccaccccctataccatgcgtacgaccccaccctaccatccggcaacccacaccacatcacctcactctcccacacactatccatatccggctcagcaacctccctcctcgccgcactcgcctcccacagctgcgccgagtactttgcttcccacgtatacaaatcatacgctccctgcgcgaccagtatgccgaagatattcgggccccacacttcccgggaaactgccttggctgagccagaccggctaggggaaccgagccccatgtactcaagccagaagcgcgcttacgtctccgagtagggcggcacgctagtgtagaccgtgcgcaggcgcgtgatggtcgtctcgagtgtactgagggctaatccagtgagagtcgcgagcgggagggacggctgcctgcggtgcgtgtacacgatactgtgggcccagcggggtagtttcgtggcgtgtacaggggctcgctggcgcggcagccccagcggggagtcagagtcaggtaagtcttagaggtcaggtaggcggtagaagcgcgctgtggtacgctgggtaaggaaggcagtggagtaataagagcgccatgcggaggagtggaggagggcgtggtgtatggtgtagaaagactggaaatcatcaggggaggggaagtcaccctcaagttggttggtggagcggtagatggccgctgcgagctgggcgaggtagaatatatccagggtgctgtgatttatcagtctttgtacttgtagtatagttcatatccttgaaacttaccgattaaacctcaactcgcccgcgccgaacgaccatccacgcgcgtgcagcttctcgacaacatcaaagacgccactgtcgagccacagctcctcttccatatagatgaatgctatccgcagcactttctcgtggcagtccaccggcaccacgccgccttcgacgtcaacgaggaattctttagcgctcatggcgaaccctctgataagtaactgatgatgatggtggaatataaacaagatcctcaatcggtatgccaggggtcaggatgcaagtaagagctggtgatcgatgttgttaagtctaagcatattgaagctaccatagccatgagccacggcagaaaaaaaggagtcacagccgcggggcctgtacgaaaaggaattgggatgaaaatcatgtatacccccgggacgaagaattggtcgagaagagaatgagattttttttaaaagcgtatatcggattttgttcagttataatgtattccacgtgctcatacaaatagcatgatcggtatttcggggaagcttatcacttagggctaattgtcacaaagccgattccgagacccgaaatctgccatgtcatgttgcgtttgtcttttgcgggcgacattagtctacatgcagacttataagttagctttttgctattgccgggatggaagcggatatttttatcaatatcaatattattagccgatggtcctcttcagctctcgagactcgaatgtcgaggattgacatacgggactacagctacatcagaaagaaaagaatgcaaggaatgaaagcaaagcatattagaagaatattcgagactaccactaaggcgaaaatttaatctgtaacaaactcgtgatgcaagaaagcgccatcataacaccaacccatgacaacaataagagaagacggcacgaactcgcaataccactaacaagatcaagtagatgtttatgtatgttgcaagaaggggaatagttgtaatgagacaacccgcaaagcccggccagctgagaaagaactctatacaagtcgtgacgtgtaaatgcgctgaaacagatccagagaggtgtaaagggtgtgtgtgcgtgaggttacggggggagggtatgagacgccagaaaccggaatggatacaagctccagtgcgagatatgagataatcaaacgctcaacggatcgaaggatagcaagaaagatgaagatttaggatgggtgggtggatcatggactggggggaaaagagaaatatgccatgcagaatgacaaactcagatatccgacgaatggactacggtggtgtaggggtttggccgaactctgcgtggtcgtgaggcttattgcgggatcgcatatacatggcatcggaggccgcgtcggccgccggagaatcaatcgcgcggggaagactcctgtgctgttgctgttgttgggtcacaacctctcgtgcgtagaactccaccagcattgtcccatacgactctagttcttcgacggtgatggcgagtcggaagtcattcagaaggaggaattgtagttccaagtggttgagctccaccagtggaagaccgccaacctgtatatccgatcatgattaattgtgatccacgactcagatataagaatcaaatacctttgcatatcgcgaattggtgtagaaaacatcagagaagaacttgctggcacaggtcacggcagcaatgaccagtcgatggatattaaaactatcaacgacaaagaaatgtgaaagtgcctcggcatccgactgaggtgaaagggtaggtgaaattgtaggattcgacccttgcgggtcctgcgcagtaaagcctgttgatgagggcgggggggtcgccattaaagaatcctgcgcctgatggaccccaggagattcagtagatgcggacgaagatcctgattcttcggcagaattccaacggtggtgcagctggtcgatctgatcacggttgaccagctcggtcatgcggtcgaagtagaccagcaagcttagaaagacttcgtaggtagtagggcaatatttgtggatgcgagtcaagtaactcaagatggtgatggtcgggacattcttgccgtgaaatgcgagtacgctggtagcctgtgggctaaggttggatgtgccctcgggcggcgggatatggcgatgtacatgttcatgatgcatatcgtttgtagtcgtgatcttggtcagaagcccagcgaccatctcgataatctccgtgaccggcatggagctaatctcatattgtcggtggtgcgatccagttccgggagtgtgtgagctccgtgatctcatcaggtcctcactagcgagactctgaatatgggataagctttggacgcgaatgcgactcggcgaactggcttcggaacctggcacagactgcatggactggtaggtgggttggagacgcggtgaatccggcgctgaccgattagaagagtatgagttgctcccagtctgggttggtggggtacgtgttgagtgagagtccggaggaaatgcatggctcggatgagacgtcatcgagggcggtcgtggtatgaagataggagtatcggaagaagcgcgggaagcttgagaaggtgtgtatgggtcgatgtaagccggcacatcattcgcatgcacaggaagccgagcagagcctatggacggtggggcagtagaggtgggggtggaggaggaagtcgagtgagtgtccattggctgggcgaaagaataaactgaatccgaattgattgcgcctcccaacgtgtcgatatgatccgacggcacgtggttgacgacgacggagcccatgtcaaggctatcgtggtctgtttttctgcgggaacacgggtcagcaaggcggtcgcagctcgggctgtgttgccactataaaccgatgggagatcagatgggaagaatcgaaaatgatatatggcaataccaaggaatggagagataaagagagggggttgaatacactttcgactaccacaagggctagaccacagatcagggaaaaatccccggttcaagacgagagagagagggaggtgggagatcagcgacagccgatcgaatccattgaaaataaaataaaaaggtaacaggcgaaagcgaagagaagaacaggaatagcaggaatactaacaggaataacaggggaaactaacgcgtaagtaatatgggaagttggggaagtggagggagtttgggtcaaggtgagatcagtgaggtcagtgtggtcccccggagacatatgaaacaggattaagacattgaacatgggctttataattgctgtttagactaaatatgatataaagactcttctcaagactgttacacacctttcactacaaagactcttaagagtcttcaaagagattatcgccgtactcatcaaacatataaaagacggtgtacaatgatgtagagctataggctgtatattgacgaatgatagaaggatctgcatccccgtggacaagtggtgattcagacatcggaaatgtcttagccctatttaccctcgccggaagggtaatacgagaaggaatctatatgaatgtggatatttcccgtatagaccatatgttgtacatctccctttgtccggccatagacttgcattacataggagcatgacagtttgtctgcatgtgggatgtgacctgttctgcctatggatctcccaaagtctgggcagtactgttctacagagtattacagtaccagatcactcatgcgatttggtaataggccaagatatataaatctggggttctccccggtctattcaagtaactataccactcggcagttatgacccaatagccagctggccgagcacttccgatcgagtccttgagctgctcggtccttttctccctacatagcccgataaaggtggggggtatagcagcacccgtacccgtggactagtgtcagacttgtcatattggctctcagacacagtatatccccggtgggggcgcatagctaaatgcgaaaaccggagaactgggatcatgaaaccatttcattggagattgacacaatattagatcacttattaattcgtcactcccggcccagtgtagccgttgtctggcaggtagagatgtctcacggcaccggccttggtcaggaccacgagacgaatgacaccaccggagctgccgtcccatttgatcgcctcctgcaaagcacttcgcacgaaatcgatgccctcttcctccgtcatctgttcccgccagtgggcatcggtataaccgtagatgtaggtcgagcccgaaccgccgatagcgaacgactgcttgtgaagggatcctcctagcggtatcgagtacacctgacctccgtgtcgtgcatcccatccggcaagaatgatacccgcactatgattcattagcattggatttggaacaaatgccgatgatccaaagactcgggtacagacctcagcgcgtccttgttctcataacacaattcctggaagagtgatgcggcaacctgtgtggtaggggcctcggtgttcgttacgccgtacatattgagatggtaagagacaatgtcggccacggcttgggtgtctgcggcggaacctgatcggcagcaccagatggtatcgtgcacctgtgtcaatttgtcggtgactcggttggcaatgtaggcaccggtggttgttcgactgtctgcacccaggatgactccgtctttgaagttgatagccatgctgttggaacgttaatggaaatgtttctagatggtaaggttcaagagctccagctcaactcacatcgaggttcccaagctgaacgaagaacgatgggttagtatatgctgtgaagctccatggttgataatctcatcctgggtttaacttacttgacctcgccggacttcaggtggttcatgtcgatgtgaataccatctagagatattagctggttgctgtcggcggatgacgatagctctcctcaccttcaccgagcattcctgatgttccatgagtggcgaccattttgtgctgtgttcaggagaaagtggagaaagtagatagatgacttcaatagacctgataaaagagcaaggagaagagggaggtccagggaagaagtagaggtgatgctatcatgaacacaggcagaagctcacaacgcggcagctcgggcggtgaggccccagcccctgcgattgacttatcatattccccgcgagactcctgaagctcaaattcccttttcttctgtggttatccctattaacttaccgtattcatctcccgtcgcattcaagatctcttctagtcgataaattggcaataccagagtccccatacctcgttttctcgcgtcctctatctggtccccactcttaaagtgccagcaccatgtccgaatcccctccgcctccgtcctggagcatcagcaacatggccaacagtgctgcacaattcatgcgattgccggttcttgcatcatccggtctggctgttgttgcaagtgggctcctctacttcaagcaaaagtacgctattagcatctaggccatttgtttacgaagctaatcgctttccccagtgaactaatttatccccgcaatgtccccgtggatgcccgcacaaatgttcccagtcctcgccaatttggtatcaccgactttgaagacctccagatccccactcccgacggggagtccttgaacgccctttttcttcggcaacggccaggccgcttctcgcgcaatgtgacagttctaatgttccacgggaatgcaggcaatatcggccaccgcgtccccatcgccaaagctttacaagatacacttcaatgcaatgttttcttgctagagtatcgcggatacgggatgtctacaggcacaccggatgaagccggccttaagatcgatgcccaaaccggccttgattacctacgacagcgcccagagacaagggataccgagattgttgtctacggacaaagtttaggtggtgccgttgctattaacctggttgccaccaacgaggaggaaggtgatatcggaggactgatcttggagaacactttcctgagcatccgcaagttgatcccaaagtatgttttcgaattatcagaaagattcccgtgcgataatactgacttcaaaccagtgtcttccccccagcacggtatttggcacgtttctgccaccaatattggaccagtgaagatgtgctgcctaagatcaccaaaactccagttcttttcctgagtggactcaaggacgagctggttccgtgagtttgcctacgccaagcgtcacgctttctttactaatattccttagtccgtcgaatatgacacaattatttgccgtttgtaactccgaatgcaagatctggcggacactcccaaatggcggtcacaatgactccgttgctgagccaggctactttgagcacattctttccttcattacggaagaagttctacctaataaacagtaaaccgacctgacttacttatttgcttgggcttctcgaatccctagcgaaccctttgcctaggacctcccttcccgggttttatttcccgccaagaagtgcaaagacttcaagctttgctgcaattgcttggctatctcgctttccgatggccaatctaaacgtctggttaggcccttacaacataagactcaattgacaggaaccgttgattatgaccttgatacccctgccgcgcaaccaagacacgaatctcactttgcatccgttcaaacgatcacggcccatacatggccctgatgaattcctttattatccccgagtcctcggggtgaaacgccatacctcccatttgagaatggctcttttcttctttctatctcaccttgtgatttacattcgattcttgtttccttcttgtttcctccttgctgactattatcatactcgcggtgcttacaagaatatcgggcgctgggcgtgtttcttttctctgcttcatttttcggcgaacccttgcctttcgccttgcttatcagctccggcaaatttccttcttgtgcaaatactaaaccaagagaaccctttgaaatcgggtacgaatgtaataatcttattcatgattctttcgctgtgcagtcctagatccctaccaacgacgggctacgttggcattgtccggtcgttctaaagactcttgagcttacttgcaaggtagaggggaagcggaacccccgggatctaaagagcgaggtcactaaacaagaagcccattatccccttgggtggccacagactcggtaactatcagccaatgggcaccggccatcggcactttatgtatcggaatattgatcagacgatcaaggatatttggcgtcgggttgtggaggtgcatagaactgcggcgactttgggtgagaggtccggggattggcgatgataataaacagatataatttgtgttttggtattggtgcttgaatatattagaatagagatatttgccagcgagtgcattctttgaatctgaggcaagttgaaataaaataatgttcggttgctgtaccatgatatatatcaccgactcctgactgatacgattattctttgaacgaacccatgcatgataatccacaagcacgttcgtgtcacttctttatttattgaaaacacatacatgcatgtaagactggcgattaggatggcgatttactagaaatctgttttagaatcagtggccaattctttggaaatacccatgtctattattgaaaccacgagagtttaaagtcccaaagatatataaaacatcagacaaatggaatggggagatacatataatacacgccacaaggttttagtacaagagaaacaaactacggaagtttctcggcctcttccaccagttcctcaaccttgaagttctgaacatcaccccgggtgaacatgcgaacaagctcactcttccgaccagcagcctgtccctcaaagtcatagaagcgctgcagacagctgacaagccatgttgcctgtggggccgaaacaccgccctcgggcataatctggccatgcataagaacaagacccttctcatccgctagatcgaggtggtgagtaagagtagtgtgaggctgggcaaacgagccatgcatcttgtaagcagccagattcgtgaagataacagtagaggtgtggctattcgaaggcgacagagtcgatccctcagcaggcgggtggaaagcccattggaggaagtgaatatcggcaaccgtgccaacggctccctcgggcgattgctctgcctcttcggcagtctgcggacgcgggaggggcaagatgaactgcgggttctcgcgtccggcatgcataatgcgattgtatgtgtcgagagggatcaccgcggtgatggcatacgggttctctgcaaagcggagacgccagagcgcttcgatctccttgactgggagctcgcggaccttctcgatatccaggtaggagctgagggccttgacggggctcgagtcgctggagacagcgcgtgcagccttggcgatgcgcgattcctgtgggggagggggtgctttgaatgctgggggtgtgcctgggacggtggtggtggatgtaggagctccaggctctggggtagctggggtggatgctttgcggcggagttctttgattttttcggtataggcttccttcaaagactcgactgagtcatgtccctccctggataaaatacttagcaatatgcaggaggaattgttcaggaaagtttgctcactctttggccttctggtccagcttggaccgatacttttcgaagacatacttgggatcgtggtgtgaggcgaggaagcggacgtcgtggacttgcgcccaccggcgctgctgatgacgcagcaagtgggagttgccacggaccaccgattggaatccttgtagtcggaatgatggcattttgagtctaaagagtaaataaaatgaagctccgaatctcgaaatgccgggccggactagttatcagatgacataattactgacataagcatattatttgttgccatattattaaggcacaaagtgaaataaactaggcatcaatattacctcattaggacatgtggcttccttatattttactgaagagtaagtatttcaagaatcctcactgggtagaccaaccgttagctactatgcttctgcgagcctggggcggtggtgagcagaattgccatattgggccgtatcggagagaccgatgcaccgttcaacacagcatcaagaggattctttttttttttacccctcgggcttcagagtaggtagccataacatgcaacaaaggactaccaagaaggtaagtattgatatacggtaaaagaaatcgaaacaagacacgtctagcttttctagcacggtatcaattctccaaatctctatgttgagctttccaagttacacctcttgatcctttgatctgcaaatagtcacaaggatatttttgtttcttctttcactgttcgaagtaactgacttgactcttaaagcaaaaaaccgtcaacataccatctgtacctacctctgttagctccaatatacgatctctgtttctacggtatatccttgcatgtttctgaggaaatagattgattgatgttcaacagaaaacctaagtgccacctaatgattgcaaaagtctttcctaccaattcacatctccatacatccataactcataactatacacctgtacatggacccacctgtgcccattagtcagcacatcattgcccaaccaaggctgctcatgtggaatgggccctgaactataactttaaaggcaccgtcatctacctaaatccagctcctcagaagcaaacccctcatctaccaatatcctcatcttttcgacatcccaatcttccccatctcagaaaagggaaacaaataacctaaaaaaaaatgccaatccatcaaaaagaattctccaccccaccaccccatccaccagtgggcacgcccaaggactccccgtccgcactaccctggtactccatcgcgccgggggtatgggaatttctgctaaatggcgacggagagcacaaggctgtgctacagtggtgggagccaaatactgtctctgcacagacagagccaataacacacacctacatcgaagaggtctgcactctgcgcggcgggctggaagatctgtcgctcggacagacgtggagtattggtgcctatgcttaccgtgagcctgggatgaagcatgggccatatcgggcgacgaaggatggatgcctacagtttgttaaggtcgtgccggcgaagaagtagggtttggaggcttggattttgagtgtgtagctggggtctacggacattaatggctacatctttggctatatgagatttgggtattgatgatttggccttttttttggagttgtgttagagtgtctctggctagttgtttttttctttctttttgctgcaggctatgccaaatatgacacattaaggaatgaacaactcgagaactttatgcaaggagttaacaaaatccggggaagcgggtctgtggttcgaatcacgatagaattaatacaacttcattttcttctctaagaaagaaaaaaaatggtggcctcccccaatttgggtgatctactcgtttaaactagccgcgtaacgggttctatgcacgtgtgttgttagcgaatctcaatcggtcctacccaaacgaagggaccagacgggccaatacctgttaggattcctatgttctgagagatctcgccctggcttgaacacgatctccggattcttgcggttaacggaaggtgtacagccttgggcccagagactgcaccgacggtcagatacaactgagccaagtggggcttggggtgaaataactagtcggtctggtcataacagaacctttttaaaatctttctagggatttgattggctggatcttgttcttctcagttaggtaataatgaagctattcagagttccgaggtccttttgatacaatattctatcgtgtatgatgagactccaaactccaagttaatgcaaatgatttcgcaaagaaagggacatgtccaacgcttttgaaacatttttcattttgtttctcaggtcatcaatcatcagatcctgtccgaatccgaaggttagaccagcacatctgtaacaaatgcttcaacctgagttgcctcagcctgagtggggctatcttccgcagaagtctcggtctcaggtgcaagttcagattttccctcagggtcctcacggacaactatttcctggtcctggtcccccgcttcctctttctcttccttctcctcggcctcttcccaatcatcaacaaccgcagtcgcaggggccttcgcacgccaggacttcccaaccccaacgccagatcttaaaaccaagcgttccttcttcgccccgtcactatcgagagctgcataaattgacttgctcacccacgggttctgagcaggagttccagctctcgaactagccccgctcccacccttactcttcgaagcaacctgagcccaaccaccgtctccagtactagcctgtaccttagcggcttcacgggtcgccttagcctcgagcgcggcgacacgacgcgcttcttgttctttgctgcgctcccgctcgcggagcttgacgcactcgcggacgctcatgccgccgataccgatggtcgagccgctgcccataccgaagagaggaggtgtccaaacaaccggttttaggacgaagacgtgacgatgaggttctgggtcgtggctttctgtcacgaagccccagtctgcggcgagggagtgcgcaaatgcgcggagagtggatttcgccggctggaagcggaatgagcgggtgggtttgtctgctgctgccagggtgtggagattggactcgtaggtttggagagttgataaaggtaccgagcatgcgagctggacatattggttcagagtctcttccgagtaggggaggttctcggctgtgatggtttgaagcgtggttgtctggttgatgtcgatgccgagagcacctgctagggagcggttccgctctagacgcgtgcattcgtcgtcgcaggccaacggggtcaactctggctgccgctggggcgtctgcacctggcccttggaggttacagccttggcggcattacagcgtctgtcttgtcgcagtcgcccacagctacatgtcactgcgatcttggacgaacacggtgtcttctctggacacgcgtatggcgcgtggcattgctctgtgcaaggatggccgcacaccgtcttgttctttccacagggttggctgcaaggtttggttgcatcttcgcaatcctccgggcgatgacagtccttccggcagaaatgagagccacacttgagcagctgcccgcatacttgaccgcagcgcgcatctgtcagccagcagggcacatttttcaacacccgctttccgcacagacacgccttctcggtcaagaatggacacttcggacagttctcctcgtctgtgtggcaggtatgtgcggcttgaggatggccgcatcgctttggacgctcacaggggaagttgcaagcaggtggctttgcaccacacggctgcggcggatacagaacagatcttccgcaattacacggaatctcttcgaacactgcctcccggcaggtattgcaagcacccttatggcaaacctccggacatgtgtgccttccgcatttcagcatccggccacatacgcgagtgcagatatgctccgcttcgatgtcctcatcagcagggcggagatgagacctgagtttacgacgcgcagcctggcgctcgttggccctttgctctcccggacaacacctttcagtgcatgtgtgtcgaccacagtgtagagtcgccttgcacatgcgtgggcactggggaggctcattcttgccctgatgacagattgtcaggttattagtacgaccgcagttgcacttgatgtagacattgcgcaaacaagcaccgcaggatccaacatgacacagcttctcgcaaggatggccacatggtaatgttttcccacaaggcttttgacaattcaagatagggtcttcgcaggatgttcgaggtgtatatcccggggtctcagataacggtgtcttgccacaggcgcaattgaggatgacatctggtgactgtggacagtgtgcaggatgagggtcttgcggatgacagttcttctggcatgaatgtatgccacaatcaaatggacggttacaagtctctccacaagcaaagcagccagtccactcatcttccgagccatcgtcgcgaatgattcgactgtcctcctcatcgtccttagacttacacatcatctccgtctgcagttttccacagtagcaacgtgcatcaatgctaacctcgcacccaccacacaatccctcatgacacggaagtggacatgtatgttccccgcacggcaacaactcaccacagatttcgccacagctccatccattctcataatcggtatcccgacaacgcttctgcgacgaattacggccacagaaacaatcttgtatcggacccatagcagtacaaggtgtacaaggaccagcatgacaagtcgtgtcacaaggatgggggcaacccttgcgaggccgtgaacaagtctgaccacacgagtgcggaggtaaaccgggaagtggtcgaggatcgacctctttctcacaccagcaagagtagctcgagggaaagttttgctgataaaggttacagcccggacaacgccaagcgcgaggagtggtaattttctgcccgtcctcttgagcagaagttctctgtgcggctgcaccttcattcgtggaccatttcttcacacagctcagatggaaaacagtccagcacagctcacaagaccagacccgagacctgcgacctagctcgctgcagcagatagggcactcgtacaggttatgcgatatgtcttcgtggatgcgggtagccagatcgtcggctgtggacttcgctgtgactttaggtggcggcgccctaggctgcttggctttccccttccctttcaaggatggcgttgcttcagaagctcgtccttgctggaatgacggggcgcccggtacaaaatccggcacttcgggtcttaatgtgttatcatgtgaatgctccgcaccatccaatagagggccatttttggcctggtctggtcttgtcaacttggcttcgaagccacgcgctctcatcccacgggttcgcgcctctggtcctgtctcttggctctcaagtcctccattctgacgaggtccattatttctttgtctgcggccccttccttctctgtttccgcctcttcgcgaattggacggtccatcttgttgattgggctggggtatcgtattcggctgtggttgagactgtgtaggctgtgcttgcggtgtagcctgattttgaggttcaatcgcaggggttttttgctgaccgtccggcttcgcagaaccccgccctctgcgtctagatggcctggaagaacgtgggggtcgtggcccagttgggattgaagtctctggctgtgctgttgccatagctgaaaatgcagcggatgtctgactggagactcctagcgtgctcatatgcttccggtagtctttctcacttgcgcttggcttgaagagggtaattggtagtcgactgagtgtgttggtataacgtagactagaaaagtactgagagtgaaatgagcggaagctatacactgaataaggcaacgaggaggaaaatcaaaggcaaaagcccgcttatagaatgaagagagaaagtgtggcacaacaaattatccatgaaggcgataaaagctctcctggcagaattgggcggtgcaggaggcggtgacacagtggcaagccgctcaggtgtgagtcaggaattacatcacatgactcattgtgcctgtgccccggtggtaatgtgggccggcaatgtataaattcgagtcatgcttcgtatctgagggatgatatgagccggtgtaatttatttgggcttggttgatgcatgcaatcacaaagtgagagggagaagaggggtgttggactccactttatgccaagacatcaaacaaagacctagtgaacgaggcttatatctataaaacagcatcttgctgcatatcacagaataatcaatcgggccttcgttatgtgctcgatattaatgagaggagctaactccttcgcttccatgcctactacaaacgaaggacactagaaaagacagccaaacacattatcaatgcaatttagtcctaatgctgaattaatgtagacaaaactacaaatatcgaacctagcgcatcaaaaaaacatggcgctatgcaaaataaccagcccattcacctcgtaacaaagaacatcgtttgattgaaatcatacacacatcgagaataggctctaaatgaacacaacaatctcaccacgatcgttacgtcttagccgtaacgcgcggaaaagatccttctcatcatcagccctgcgatcccggtccacccagccgcgcccattatcatgaccatgatcagcatcatactcctccgagagctcacggtggaagcgcttaagcgccttgttaagggagcagccacgctggctatcctttgggaccagcgagaggaagtgataggccagatcgcgctgcaggtcctcgtccgagcgcgccggcggccgcgactgcctgtagacagccacttggtggccgttcgaggagtcaatggagacacggcgctcgtcgacttgcttaagacggcgggagggtctgtcgccatcggtggggtttgagctcttgcgcttagatttacgggagtcatcgtagtcgtctgcgcgcgcgcggtgcgatttcttgttcttgcggacctcgagctggccgtcgccgctggagaaactaccgcggcgggcgtggacaagagctttgggggcggaatctgtgttggagccgttggtgctcgagacagctgaaccgccgaacatggaggagacgaggcggccagcgcggttcttcattgagatgccgagacctggatcaccgttgccgttggcttctttgccgttgcggcggctgcgcttgatcggggacgaggtatcttggtaggcacggcggctggtttcggggctgtcgtcgccgtcggcggatggggagcgcatcatccgattcaggccgccggtcaggccggaatggttcagcatgggtgtgccggcattgttgatgatgctggacggagcatccatcattgaggtgtcgactgcttcacccggggtgctgagaacctctgcttgaccgcgcttgcgcttcttctcgctgacagtgccgggggctttctcctcgcgacggcggtccttcttcttcttaggtgcgggcgtgacgaactctgttgacgcattcgggggcgatgctgagtgcgggatgttgccggcaccgtatgaaaagccattctcctcgaatgcgatatcgtaatttttaccctcgtcatccgtgttggggtttgtttcgacgcgagtaagggactggctgggctcgaagagcgatttggcattggggttcatcttcatctgttccttgggtgcggcaagggtgaccttggatgcgttcggagtctcatcggcgacgaggtaatcgaacacattgacggccttgtcattgttggccgggggaggagcaggggccctcacatcaccgacaggagggggagtgggagcagggggaggaggagcgttcttcagggcctcgccgtctgaaccgtcgtccacacggggttgctggtgacggccgttgggattctggttgggattctgcttgttgttttgtcctttctttcctttctggggcttctctttatatagagcaccctgatacttttgcgcctcggtcatgcatgactgtggtggccggtctcgttagcggatgactcccttgttgattcaataattaggaccctagtggagtagccccacgaccattatgcgaaaatgcgacgcggatccgacgtaccgtatgagctctatattccaatccgtagaaatgcaccatacaatcgatacaggtgaaggaagcgccgcgacattggccgcgatgaggatcgagctttttcttagtgagaacatcaccacatgcctaccacagtgattgttagcagcggttcgagcgcggcacacgcctcagacatcatataggacttacctcgcaagagaaggagaccattgttgacactaaagatcaccctatcaggtgcgcaaagaagattttgagggcgggatttttcaagaggggggttgtatcccttgagaagtccagcacaaaacgtctaagcgggggatttgctttgatacaaactgcgatatctcggcttttcctctcttttttttctttttcttttcgcgtcgaaaattggcgcgcaagtccacactagtctcgatcgggagccgggctaggctattttgggtaatatgaacagcctgggcgcgtcgagggagaccaaagtgtactccttccaactattttgggaacattcgtcgtataaaagaatgcaaagaatgggagaaacccctgatttatcatctcttgactcggcacatgtttcagggtaactggaaaggcgcagatcccatgcggacatggatggctggcctgtcaggagaccccatgctttcattcgcttcttcccaggatacgagaagtcagactggccgactggccacccttgaaacatcccatctcgacggctgtatgctatttttggccccaactcaaacactcttaccggactataccgacatatgctaagatccgtgatataccgccctttttgaggtttccatcatgctacgcgaaattagttgatctgttggagggttggtatcgcgagggtacgacctgacgacatcattgctgttgctgatagtgaagaaagtttgatcggtgctttgtgctaagacaagctcggtatgacggaatgcgccttttcgtctgctctgcggtttagggatactgtctaggcctctttggtcatgcgcgccatcttctacacttggtcaccaggtaggatgatctttgcgcgtagattgctcgggtcatgcactttgtagggatcggcaatctagaggatgcgggacatgtatactactactagtcgttgaccggcttgtagctcgctatcatttgtacttttataggattgaggtaggctctccaagtatctttattttctgacatgtgtaaatgagcaaaacccccaacagatatgctcgggaaaaagagctagaaactaatgataagaactttcgatacctcgagacagacctctttttatgccaaagccacatgcataacacaacaagggtatattgattgatattgacatagtcaacctacgatttataattgtacaagggagaccagctccataagcgtgtgcaacaaggtgtctaagaagcatccaagcgctgggtataaaccagacaggacgagccccatgtaatcgaaagaatagtcgaaagaatagttgaaaagtcatcccgtcaaccacgggtcgtcctaaaccacacattagcaaccaaacagccataaccacgcggcacaacaagaagtcactaactcttctttcgagatctccactgcaggaccatcatgctgccccgtagtctccttcccagaatcagaccgagaagtagctgacccctccttgccctcacccaccttatcgtcctcactgcagccgcaatcatagaattcccccagattggtgcagtcaaactcaggcttatcaagcatcgcattgacctcattatgaacgaagcaagcccagccagaagccgcattgcgcgacgaaacctgaggcggatacttgctcaaatgctgcatgaaatgctcagcacattctccactgatgtcatcaatcgttagtctccgatctggcacagagcacgtaggctaggaatctcattaccaaggatataaccgagcaaaaaggtagatataagagcgcagagcctccttttggtcttccgtgggcgtctcggggaaccgcgccatgacagtgtggaagtacttccaagtcgcacgacctaattcagctctggaaaagccaccaattctgtaatcagcaatttgtccaattgcgctcgtgcattgcccaatgtgtccctccccggagcaccttacttgactgtctcattgcctagcttcggcatcaccacgtcgcccttcagtgtgttatcttggatggttatccccggcgcggctgccggtgccgagtggtcgatgtggcctggagcgcggacggcgggactcggtggcccctgaggtcgaatgaagaggaagaatatgaggcatagtgcgatcgctgtgctgctgataatgcgccgtgtgatttgtcgattcgccatgtttggggcgggtggtgatcgttggggaaaagcaatgtcgcgaagcgtccggtcgcgggagcacctggaacttgtgagcagggaatagtcccacgcggaatacgagatagaagatttcagctgaggatctgagaaatgagtgctaaagggctttgaacgaaggggattccacgcttgggctccggggaggcacgccacagcttagtcatgggttcgccggggccacaagtgcgagccctagaagattcctaaagtgtctgtcatacgattgatccgtatgaaacaataacattcagagactctattcatactaggtgagcattgctctccgaatcatagactcagcccatagagacccacatcggatgtgctccgggtttcgacttctgaagtggatgcgtaccctactagtagtaatacattactgtgctcatggatgccaaacatatatatctacatcccatcatgagttccacctactgaaatcgagtcgctcaaacttggaggtaagtcctccttgcgtgtaccccagtcgctctccttgttcccaagtgtcagctccagcatcatacctcgagtaaagaattcatgtccaatccagttcttggtgtagggctttccattgagcttggcactctggatatatatattcttgtaggttttgtcaaagttgacattccgaatggtcgcagtctgattggtttcagggtgggtgattgcgacggccttgaagaacggaggaattatcaggtacacattctgaccgggattcgggaacaggcccatcatgctccatgccaggaatgagcccatggctcccgagtcgtcgttgcctggtagcccgctatgcgtggcgttgaatgaagatgggatgtaagcgtgggctcggctggcggacagaccagggcgtcccgcgtagtgataatcatacacggtcaagaagacaggttcattgcccatgtctgccaagccagaggtgtggaaatagtctaatcgagacacgaaggattctgggccgccgactatcttgatcaactttgccatgtcatgtgggacaaaactatattggattagcgttagaagctgactgggaagaaagagtacacgcacaatagatactcccagatgctggactcgaatgtctcggaaggattcgaggtgagagagcaccacgacgccagagcactacaggcaataggatcctgatagccccaggttccgttgatgtactttggctgaaagaacccagtaaagccagtgtctgttccattccctaggaacgatttctggtcttctttgtacaagttctgccagttgccagaccgagataaataagtggtgtaatcatttttgccgaggcccttggctacaacggacagaccgtagtcattgtacgcgtactccagggttcgggagatactccgtgaattagtcccaaatccaatatagtcgaagtccagatatggaatatagttgaggtgcttccagctctgcagaccccctcgcccttcatatgaccattcgagtggctcattctctgcatcgttgaccatagctttgtaggcaagttcccagtcaatacccgtcaggttcttcacataggcatctgcgagaacaatatcggcattggaacctccctgcgtccagcctttgcagagactcatgcggcaatcgggcagccatccttcgtgcttgaaggtgtccagcaagctacggaccatctttgactgtgattttgggtcaatgattgtaaggaacgggtgctgtgctcggaaagcgtcccacaggcagtagaaagagtcaaagtatggctcgtcgcttttccatagtggattttccccggtcagatcttgaggtgataacatggtacggtagataccactccagaaactgctgatcatgtctttactgacgccacccgacgtgaccttgataggactgagcttttccttccatgcagcctctgcactcttacgtagatgatcaaacgcatcctccggttcaggcacttccgcttcggcatttttacaggcttgatccgagctgacaaagctgatgcccaccctcacagtcacaattccattctttggacgaccaaatgacatatagcctccggcttgaaggtagaagttgttgaagccgcgagtgacaaacaactcctgcactgatccagctcggtcattgacccagatcccggcctcatcgacctcagcgtcaccaaaatcagcacagaaatatgacttgtaagagccagccccgaaactcggcaagaaagtaccattgcctttaatttgacctttgtcggcgtcaaggctgatggaagcattctgtcgactatcccacagatcagttaaatccaccgagatcaacggattgagatcggttccatccgccaactttccctttgggaaggtaaatcgatacaatgctgtgcgccgcgccgcagtcatctcagccttaatgccattctcgagtgtcagggcaaagtagccaggttgcgcaaccacagaatcattcttgtagtgaaccgcgcgagcagctttagggaacttgcaattatccaagatattgtctttgcagtactgtgggaacagaggaaagtttcccatagacgggttcccgcctgtgccactgtcatgcatatgcgaaaagccagtgacattgctcccatcagtcgaaaaacctccggtattctggccatcgacatcggcgacgggtttcgccatgccatacgggatgcttgcacctgcaaagacattaccgccattggttgatccgatcaggggattgacatagtggagatcatcttgggttgctacagtgcctaggacgcattggaggagtaggaggctgcacaacttatttctctgcaaaattgccatgacgctctggaatgtgaagcttggaacatacgtaatagcgcgttgggtttgcggatttgggctgtcaataacacgatagacgcagaagatgggaagagagaccgagtcccttctgcaaggggtggtttttcatatcgctgtgttgcaacgtcgcattgttcatgcgatcgacggcctaaatagtgttagtgttggagttacggagacctttgagtgcggggttagtgtatccccaagtcaacaatgtactgaagcatgttttgcagttccgcattgccagatgaaagcgaaacaaggccctttcgaatcatcctaaggtattgacttcaaattatagccgtagagttgagtctctttataagtacagcctctttccaaggttgagactctggtcaaacaacgaatatttgataaatatagatcatgtgatccactctctggccacttgacattatcatttcttcgtcacttttatcattcacgaaaatagaacctacacttcatcttgtcatcccttatgccatctgcacgggaatctactgcatctcagtacaccagactacaaccaccaagctttcatggattgatacttccaagatgaacaagaaaatgccaataaacctgcccggtcttcctcttgagctgttgctcatgatatccgagcactgtcgacattgcctgtctcgcgttatgcagcgaccaattgttttttttgcttgggatctgcatgtcagtcacagcctgccaaagggccgcactgggtgccctgaggatgggcggcgtatcgattttctgacacgctttgcccgtgacttgccacagtattatctctgccacgcttgcctacgactccatatttggcaaaatgtggctctaccaggtcccaaattcaaagtcccagcctgcgtagagtccctcgatcgaaaggtacatcgcctcaaattgcctctttacgttatgcattacccaagccacgcgtactacaaattccattgtgttcatcttcaactttccatgcgaaggttttaccgtggagctcaatttggaatacccgttccgtcattgctctatacagaggctgggactaatcctatcacgaaaaaagcactgaaactcaccaaaccgtacgacgaagagaaatttcaatgtagtcatatgacaactttactgtctattgatgttcgaatctgctcgaaccctccgagcctttacttacgaacgcaagagcttgcggtagtaagacgacaatacctatcattgttatttccagatcctaaaaacgagtttatgcacgtctgtatgcatattaaccgtggctttaaattaatctctgtcgttcacagacttactaataaatatagctatgacccgacaacaaaaccccgagatcaagggcgttgtgataaaagcaatgcctcatggcaaatcgagatacggagtatgggacagaaagaagtgtgccttgtgttcacccggtggctcgacttaggaccaggactaagcccagacgatgatcggtggaggtgtcacaatgaccacgaattcgaagtcaacttggcagaacatgaaaaggttgatccctgacagcaatttgaaaatgactccacacaggccaattgctcggatgcgctctcaagaggaggaaatgtattatcgtaacatccgatttattcaaaatcagacatatcgaagcttgatgactcgctttggggtatccgactggtgcttatacgtagaacaatagcgaaatcgctcttcttgctgtgttgttagttggaatagcccaatgcattggtacttgaaggatataactgggggaaatcgcaggagcagaccaggttccaatcattgcaagcaattcaactcggcccatgtcgatgaggaatatttttgcttgtttgattgcatggggggtgcctgccgtttgtgacttgattgccttatcgggaaggcacctcctcctcctcatagcaatgactcgcctcctctacatttcctttttctttctttctttatttctttctatctttcttcgtcattgtcatagcttcgtttattgagacccccctgcctgcgcaattaaacaagcgaaagtacagtctatattctttatcgtcatgggccgagttaaatcgcttgcagtgattgggactttcatttacagacatactctaggtcgccatggtggacaaactccatcacattaccgacctcccattgcggaaatggtcccgcgcatcaggctacgattagacattaaattgacggtgatctgatcgtacaaaaaagaaacactaacaatttgcccgcttgcccattagccgtgtcaagtttgttaaaggagctgcaaattgctttcctttaccgaaagtcaactttgtcatggctgctaaccagttcatatattccaatggatgtagtggaacagcttacaattagatttgttctacatatggtgtgcacaaactaacagactgctttcttacaggtttcataaaaggatgatcaaacggggattccgacgggttcgtgggcgcagcgaactccacatggtggcaagggaggtcaacatcattcacgtagggaggggatcatggatgaatgggtgtggataattcaagatcagattagatgacatggcacgattgatttgattgattaatctaagttcctggagaccaaaaggatttttggtttgctcaaggaattcctcggtcacagccaatataaagtttttgctctcgcacgcgaccgttgaagggtgtgggcaagaaacatgatccgtacagagtactgataataacaaatagtattccatacgaagtagagtagtaccgcgaggcgcctcgaacgcttcgagacaatgcgatctagccccgagacccatcccgcatgtagaccttgcctggacagatagaagcttgggttaccatcgccataaaccccggttccgcgtatctgatcggaatcagataagtcaaaaaccagacaagagggcgtgaaagtcaaatttcgcggaggacccgaagaagatctcgttccacaatgctcaattgagttcatatggcgacttcaaaggccccgagaagatgatgattcatgcacgaggtcaataaatgcttgctgttttgggcactaattgggggctggaaacgaccttgatctttcctttgtgttaagcttctcgcgaaccttacactgtacaccgcgtggaaacgcaagggaccgggtagcctttcctagagggcagtaaggggaaaaaggaacatagtgagacagatgatggcatgactcgaataaaacggtcttcgtgatatccggccagcccttcaagtggtttggcgtaagtggtggacgcaaacgggatggccgcatcaagcaggtagcagccctgaaaagagactttgggcggggaagcgctagtccagaataggagggagactcgaatctcggccaatcggggctgcggcccccacaccatctaggggcttattggggatgatcgccgtcacggcagcccctgattgggcccaatatcagatcaactggaccctgtccgctcaccccgagattatctgatcgtcgcatcggagcctccgttcgagaccgaggaggggaaaaaaatggagatgtcttggacgactgcgggactttctggtctggaagctctcgggcctctgttcgtccgaattaatagaaaaaagaacccctctagcgtcgcagatctttcctttctccttcccatcctcccattccgcccaatactcaatccttgtatatcctcacacagtcccggaagcacctggggatctggcatccggtttgatttcctgatcggacgaaagggatacacagtaatgggtctccccgcgaccgctgaaggtnnnnnnnnnnnnnnnnnnnnnnnnnnnnnnnnnnnnnnnnnnnnnnnnnnnnnnnnnnnnnnnnnnnnnnnnnnnnnnnnnnnnnnnnnnnnnnnnnnnnnnnnnnnnnnnnnnnnnnnnnnnnnnnnnnnnnnnnnnnnnnnnnnnnnnnnnnnnnnnnnnnnnnnnnnnaagggccccccccgcgcccgctgaaggtcgggatgacggcaaaattatcgaccgaactataatcggggaggaatcacacagctcgcaaaatgagaaatcggagacacgcgaggacaatggcgacgggtcatcatatgatcctgaatcacctcccagattggacggctcccatgggggcgacatgctcgacgatgagaaggaattggaactgcaccccgacatgatcacggagggtgccgagttaggtcagcagaaggcggaagcagcagcgctcgcatggagctggccagctttggttggaatatatgcttggtgagtagatcgtggctcattcgttccggcgctcttgcgatgaaaccaattttctgacaatgaccgaacttgcaggatctggatctgcacatttatgttggcgttccactcgaatataagcggcttcctaatcaactacattcagggagggttcaagtccgcaccgcaggtctcaacatcctatatcctcgcgaatatcgtgggcggcgttcttaagctgccgcttggtaagaccttgaacttgtggggtcgtgctgaggctctggtggtctcgaccagcatttaccttcttggtatgatcatcctcactgcatgcaatggtcccaatggatatgctgccggctacgtgctgtattggattggttactactgcctatacctgatcttgaatgttttcgtcgccgatacctcgggtctaaagaaccgagcgttcgccttcggctttatgcagactccatttatctgtactgcattcacgggcagcattgcagcaaactcgatatacgccaatttcgggtggcgctggggttatggcatcttctgcatcgtgatgccgtttgtgttcttgcccctcgccatggctttcaagtactttgagaaaaaggcacagaaaaacggcatcttccgacgacagcccagtggtcgcacggttggacagtctatcattcactatatccatgaatttgatggtaaggatactcaaaccaaagctcgggatattcacactaacattctattactagtcattggcgctttcttgctaatgagtggttgggtaatgttcctcctgtcattcagtttggcgcaatatggccgctctacgtatgcgagcgcaaagtttattgctctcatcatcgtcggtgtcttcatgctgttcgtctttgcagcatgggagaaatggggcgcacgaacccactttatccgctacgagttgatcaagcggccgaccattctaggcgcatgtatactggctgccgtgctgtttttcagtttcgaactctgggatcagtacttctacaactacgtcttgatatcctacgatatttccgcagtccatgcaaattatatgatccagatttacaacgtcggctcttgcttcttctctcccgtcatcggagctataatctgggccactgcacgcttcaaatacatctgcctgttcttcggagccccgctcatgatcctcggctccggcctgatgatttacttccgtggcgcagaccacggcattggctacgttgttatgtgtcagatattcatcgccttcgccggcggcaccctcgtcattggcgaagacatggctgttatggcggcaggtggccgcgagggaactccgatgatgctggccctcatcggattgttctcgaatatcggcggcgcgattggcctggctgttggtgccgctatatacaacaatgtctttgtcaataccctcgcgaaacacttgcccgacgacttgaagtctaatgctaccgagatctacttgaatggtatcactgtgcagtcaacctacccatggggaacccctcttcgcgaagctgtcgcctatacgtggggctatgcccagcgtctgaattgcattgcttctactgccgtcttggctttgaccattccttgcattctggtctggaagaactacgacgttaacctgaagcagaacaagggtaagatgatcttctagaagggtttccgttgcacgggtgtctatgtattgtttatgtattgtttatgtgttcttttggtgcgcttaattctctgccgcgcagagagagggccgctactttcatttgtaaatttattataattatctcgttgagcgtggatgatgtgaatgtctatattggcaccaaggtgattggtcattttgcaattattagaaccaaagaatttttttcttcgtttcgcctgcctctatggcccatgtacacatattctaaccatgctgaatcacatcctttagtactggaattaattaccaaaatgaggcgacggcaagaagaccgcggtggggttgaccgcaacccgcgattggttcaagactcatacatccaaaggtcgactttaatttcacctctcttccttctaaccattggcatcaccctcaaggtgagatattgaattaccttcaccatgcctccatccgcggcaatgaatttacgcaattcctttggcgatcggaagatccccgatatctcgcgcaagattacggcatgtgtcttgtgtcgcaaactcaaggtgaggactacacggttctaaaaagagagctatatactaataccgatgcagataaaatgccatatgactgataataagcccccttgcagccgctgtaaagggcgtgggcttgcgtgttctgtcaataagagcctccaaatgctcttggagaatgatgcttcgcatgttgtccccatagcccgtggtttcacttataactctggctgatacataggtttagatggaaggaacagatggaagatcgaatgagcaagctagaacagtctatcgaacaaaacacaactcagccttctgcggttgcctcgggcaatgccgctctgccgcagccacttagtttcaacagcgtcgaaactgacattcccggcggtttatctaattccctacctctggagacacctgaaactgtcactttaaatctatcatgcagtcttggcgcatttccagcatcgtctatcatcaatcttacgctgggtaacattggagcagccccaggacgaaaccccgacccagtttcatgcggatatatctcacaggagatagcagaggaactcttcgtattcttcaagcaaaacttggacccttgcattcacaataccctcggcgagaacgactctttcagtaccatccgtacacgctctccgctcttcatcactgcaatatgcacagtgtctgccttttgcactggctccgataaatacagtcccttactaaaacatttcacaacccaagtctccgcgaagttattttcgtgcaatcatacattcgacgacgtccgcgcgctgtgtattggagctttatggttgaatgaagtttccaccgcgctgaacagtttaggtgagcgacagtgacactaatggtctcagatcttgcctgtcagtatactaacaattattcagctgttcgcatttccacagagttggatttgcacaggtgcatcacaaaaatgcctcacacaaaacgagcctgctatgaccgtacccggttatactggctggtatacctctgcgatcatcactgctctctcatccacggaagacctccccttacgcgagacttcttttcattaagaaggccacgagattttctgcaaagctatttcaccaacgcttctgacttaagtctaatcagccaggtcgagctgtggtctatcagcagtcgtgtctttgacatgttcggtgctgatattgagtacagtgccgctagtcagcggtcgaataagctgacgcagctgagtgctgcctacgatatatggctggaggaatggcttgccatgctttccttcacgaacgcaccgagcacattttcacgccgtgtcttcgatctttatttccattccgcgaaattgtatctcttctcgcatatttttcgaggctcgtcgcaggatacaaaactctccaactctgggtccgaatctgataccgacgcggacaagtttgcacacggcgcggcgagatgtgctctggcaattatcaggtgcattgtggatgacaataaatcatcctcgtggctgggaaaattaccaacctatatcgggactatggtggcatttgcctgtgtctgcttggtaaagatatccgtcgagcaaagaccgtgggctcaggaccttcaagccgagggtattcccagttaccttcagcgactagttcaggtcctcctctcgtcgccggttgtcaaccaccctacacatcctctactgagcattgccaggagtctggagactgccactgctgtcgctgggggtgtatatggccaagactctctagcctcaatcgatatgcgagatttggaccttgatctgggattttttgatatgtttaccagcgatacgttgaatgggtgtactgataaccacggtgcatttccagggatgtgagctcaacactcaaggccgcttcataatctttttttctttttctttttctttgcctttcgacaacttccggggcagcagcatatacctcctagaggacgcggagagtctcggagtcgccatgcacggctgcaacaaagaagacatcctgggggtcgcactctgtagctttctagtagcctcttgcgacggcaggattagttagttacagcttatacttaattttacccttggctgaggatagtttttgccctaaacaaaatgtcggcagcgatctaaggtggtctatttcatgtattctcagtagaatcctgaaaagtgcagcgaatgaatttcacactaaaagctataagggcacattagtagcattaacataaagagcaacctgggacagaataagaatatcaacgagaataagaagcattttcaaagcaccgtccatcctctgtcaatcaaatcatccaggtagggtgacaaggcccaggcagagccttctgccccaagctgaaagaacccaacgatacttccatcttcgttgtcatctacaacgatgggcgcgccacaaactccttcccggatcgaactagtagtgggcccatagagacggtaaatattctccgtaatgaactcagtgaacgggaccacgataccgggaggtcgtggtggacttcgatccttaactccagccaccccgagaaacactgctccgcttgccataccgtctgcacaacaccatgtattattttggacttcagtggaacggatgaggcgattcggaggctgggcttgggaaatattccccatttgtgaatgttgtcgacgggtaaagtttcaccaaagcgacgtcaagggcatcgaaccgttcgtcaatgtgaccaatgcaaacgcccccattctgagaggacggatgatagacctcatcagagttgataaatccgtgattggagacagtaagtctgatatatcctgaatcggtgtttctaagtttcacgccggcagttgaagccatggtggcatcgaggtaaccactgtctctgttagtaaggccacactccactcgcacttctgggcagagagtttggaggtcagtcaggaaatagttagtcgtatcctgaaccgttccaggtgtgatacagcgttctctgctttggcacgtcagaggccaaaacggcgtatgactgtggtggtatacagtgaggagaccaccgactcttcctgggagagatcgggtgctgtatgatcttccatcaagcgcgatctcaacaatgatgataggagcaatgtaattgacagcctgcactgtcacaagcctacccagggcccgtagaaccgcttcccgttgcttttcggatggtctctcccacttcggtagttgaaaatgcggagagaggggatcaggtagcctcgggttgctgtaatcggtgttcgttgtcaagtagggccagttggatccggcagggataaacgttgctgcaacacatgccacagtcaaagggattggatttgggggaaaacgggtttcaatgatgatgtctggccagctgtaggtcacactttccgcgcggaaggcatcgacaatccacttcctttcttcaggtgtaggaaagcggaaatcgtgtacatgatcatcccagagagagaacggggctggatcagaagcatttcgggcgccgtatccattgttagttacccaagtaaaaaacttgggctggtgggaagcggtgggttgttctggaggagcggtactttcagggtgggaatgcaacagcgtttcgtaagtctgttgccttgatccaaatgcgacatatggcatttggaagcgcagcgtttccaccgcagatagtcgttgctgcataccgtcccgataggctatgtggcctcggctatcgatctgaacacgggctcagacagacaggtatttgtgttgacacacttggggaaaaggcagtgatgtgacgttcagccggactctgagtacaggatgtagcagatgatgttgtctgagataaagtgaactaagtaacctaatttcaaagggaagtgacgatttcaaacggaagtgacggaaggatctatactctgccaggtacggcagccttatctccccgctagttacggagtagttagctaacttatcgcgctagcatgttgactaagcacggtcgcccctttgggtttagtgggtgcactctgaatattcttcttcgggaccgccatcgtagaccaatctcgaaagaatcggattgttattaggacaaggttgtattgcattttcgtatctcttacctagccctgtgtggtaagatttagtcttgttttctctcgcatattcaaagattgaattcaaagttagagtagaccagtgaacacgcttaaacccttccacgtattgcactggaatttttttcgttgatttctatttcgtacctagatcaaacggtctaccgtggctattctgtcagacaatatatgtatagcatcgggtttagtatggtctggggtgtatacctagggtcccgcgggaccatccgccgtgttcccgcggtccacggctcgacggttagattatgtaatccacaatgaaggtcccggggccgccaggccactgtgagccaatcacgcaagtgtcatgtgcagatcccccagaaagtaccgaggtcgggggcgcgggtctcgtttgtccgagataggaattgggagggctcttgcatttttcttggtttctttgttaataccagatccgattctgaatggcaaccatcaatgccatcgcgtcggagtcacacgaaatccaggaaagggtgtttggagtgtaaaaggagacatgtcaaggtgagtgacaattttactcccctgaacccgtcggtggatgtggttcgggaatgtgcctgaatcgtggctcaaatagcctttacggacggcggtgatccaccagccgagacccaattctgacggaaaggccagtgtgacgagggcatcccaacatgtactctgtgcaggaagcgaaagatggagtgcagatatcctcctccaaatgaagacgaggacagccctatggaatcatctagtgcccaggaagaaacagagagtggcactgtgaccctaccaagggattccacacaagcaacacgcttgcttgagacgagattattccaccagtatatgacttcaacgtaccatacgctgtcgcaggatggactgtcaggacaccatctctccatgaccattcctcgcatggccgcatcttgcccttacctgcttgacagcatccacgcattctcagccttacacttggcctcggttgaaactgataatcgagctttatggctgaatcatgccgtgcgatatcagagccaggcatgcgctggactaagtaaggttcttccagaaatctcaccaccagattatgaaccagcatttgtctcgtccatcatcataatgctatttgccatgggatctcgagtactgtctcttgaaaatcgaacactggacccgcttttggttgttctcgaggctcgtacattgatgtccggccccgccatgcttttttcccggatacttgaaggcggggttgacgcacagctggatggatggctgtgcactcctgacacaccagaaagcctcgaaactgggaaacatgatcagtatggacctcctgctctctggctcatcggcgaaaggttgaataataacatgaaacagtggcggcaacccagtcgagaacacacatgtattatttagcctgcacacgtatgttccagcgatgtatagagtgacggtgtagggcttgcgaagctgataatagaggcagggatttaatgatgtcgttagttcgacttcgtgcgatgattgacacaagggaaggatcggatcaaccgatctactatggcacatggcagcagttgcatcgggccatcgagccgtggccaaaaattggaccgcatggtggcccccttgcatggcccttattcctctccgacaaattttcctcgctgctccaacatggcgattggattgcccgagttctgtttctgcattatggtatagctatgcgtctcctgcgccatcgatggtacgtgcgcgactggggtcgtcggctagtattggccacactggaaacactggacaaaatccctcaggagtgggaggagaccatgtcgtggataagacgagccgctgcaagggaggattagtcacaaggatgataaccagatcattcggggttaaatattgacaacaaaggaaagtccaactgatcaccgaatcatatccacggaagcaagaggttacatttagacgatttggagcatggaatttgacccaatgactccgaaaaacccccgcgctttgacaatttgggccctgaagctacccggtggcttatcggcggggtcgaagcttcgggggttttacacttaacacaccgctacgcagtaggtagatttaatggtattggaagacacgcaccgtcaagatatctgatccttgattcctatccttcaatccctcgtccctcgatgccagttgcattttctgagcaacctagagcccgccgatcctgaaccaaagcgtccgaagcgaagctggacgttctccaatcgtgacatgcaacacccctgtcgaactagccaagatgtggagaaacaggtacagctatctctccaaggttcccctctcggttattgtttttgcccgattgaaaatattaatattggatggcgtcttagcttgagttggccctgccagcatcttcttcccctgtaccgactcttgggcattgcgtaccgcagagaaattggaggcagactctagtcaacatgctacaaccgatcagattaggcgttttagcgattctatcgctgctgttgatcgcaattcatctacccactgccaacaccttccccttggagttctccgagcgagacacgaatgctggccacgggtcgcacggtaagattggtcctggaaagctgggcgctgttgctagcgaaagctcaatctgctcgcgccatggatctgatattctggagaagggcggaaacgctgctgacgctgtgagtatctctatctgggttcgttcgcgataagggtgaacctcggtactaataatgacatagttggtcgcgacacaattttgtattggtgtcgtaggtgaggctacatcaatccgctcagtagtcgtatctgagcattgctaacggatacagggatgtaccacagtggaatcggtggaggtggctttatgctcgtgagatcagcaaagggtgattacgagtttattgatttccgagagacggccccagctgcagcattcgaagatatgtacaaaggcaacgaggatgcttcaatatacggcggactagcaaggtaagacaagtacgcgcagcagatcggaaccaggctaacaatactagtggagtaccgggcgaagtgcgaggtctcgagcacctccataagaaatacggctctctcccatggtcgactgttgtgcaacccgctatccacacagcccggcacgggttccctgtcacagaagatcttgtcaaatacatggcatctgctgttggcactggagaggacttcctgaccaagaaccccacatgggcaattgactttgctccgaatggaactagacttgggttaggcgatacaattacccgacgacggtatgcggatactctcgagactatcgcgcagcgtggcgcggatgcactctactcgggccccatcgcggagactatgatcaatgctctacagagcgagaatgggacaatgacgctcgaagaccttaaaaattacactgtcgccattcgggatatctctcagattaactaccgtggctacaagatcacgagtacgtcggccccctcgagtggtagtatcgccatgagtattttgaagatcctgggtacatacaaagatttcttcacgactgaacaatctgtgaatttgagtacccaccgattggacgaggcgatgcgatttggatatggcgaggtatgaatgcctaactctgatttcacgggtggactctgctcaatggtcgcttacatgaactacagagatctaactttggtgatcccctgtttgttgacgggatggccaagtatgagaaggagattttggaacagtctacaattgacgacattcgatctaaaatctcagatgtgcgaactcagaacgtatctgtttatgatccagccggactggaaagcctggacacgtaagtcctgcttggtgcatcattctttcatataaagctaattctatatcagccctggaacttcccatatcgcagtagccgaccacactggccttgcaatctccgtaatcaccacaatcaacctactatttggtagccatatcatggtgccagaaaccggtatcatcatgaacaacgagatgaacggtatgtccatgaagccaactctaggtcacgggattaactaaagatctcacagacttctccattcctggatcatcgaactcattcggatacatcccctctgtatctaactatgttcgccctggaaaacgccccctttcctctatcacgcccgcgatagttgagcgacccaatggcaagctattcctgattgcgggatccgccggaggcagccgtatcatcaccgcgaccgtccagaacattatccattccattgatcagggactctctgccgccaaagcgttggccaaaccccgtctacatgatcagctgattccgaaccaggtcagcttcgaatacacttatgataatgcaacggtcgcctccatgaaggcacgcggtcataatgttacttgggttgctccggggcagagtactgcccagctgattcgggtcttgcctaatggaacattcgatgctgctggtgagccaagacaactcaactccgctgggtattctgtataaaatgggatatattgtgtagatgccgaagtacatacattgtcaagtgcgcatcaatatagaagacatcgcatcgctatgaatagatagaccggtctagcaagttcaagtctttcgcaatgcatccctttgttgtatattgcagatccctgctagagtgacgtttctttatcgggtggtccgtgctttcgatattcctttttctgatgtaaagagctctaattcacttgaccttgtcttctccattagaagtctacgctgacgtgaaaagtcgacatacatttgtctttttcttgagtttcatatactagtttcattgacacgagatcgcgtcgccgtaccaaatttacacgtgaattgtcctgcgttcaagggagctagccttcgtcgtgatctccccgagaagagcacgcatttgactgcacagaagacttgcaggtagctttttctactccttgattgtcgttgagtttgcattaatcagactactttttatctgaacagttcgacgtaaaacaacccaccgcgttatgtctacgaacccttctcacttccccaacttccgaccctagacaatggctcgactcagcaatatctccgtcgtcgttcctcttccatcctttgacatcaatcccctgaagaaatttgatgaaaacttctttgatcgtgctattgacgacatcttgtctgaggaagcgagcattgaaggatcccgagacgagatgatggacggcgacattgacatctcgagccccttcgggtatgatggcacgtcggactcctcaaagcccaaatttcgtcgaagccaaagggtcgaagacaggttgtcgcaattttctacaccgtcgacctcctcgcctgcaactagcaaggcacagaaaccgacgccgagaaaatcctcgagaaaaacgaagcatatgacaatggaagataacaatagtaatgatgaagctcccgtgaatcccgaaaacgttacacgacctcagcacgaaaatgaagtcataaaagttcagtcctgtcccatccacgaggccggtgatcacccttctacacttcccggaatcactgagtctcccgcaatgccgattgatgacagtgaaaggacgatcgaagacacgatattcgattcagtgggtctagaaaagcggattgaggtattgaagttcatcgcatcacgtcctttcatgataaaaccggttcaaccggttcgtcgttcggacagacgaaaattcaatagccaactgcgcagtgtcgctgcagaggctggactgggcgacacagctatcgatgctttgattgagcacgttcgaggtgtttaccttgaggagcttggaattgtggcagcaaaatatgccggctctgcatttggggatgaagtggacggcgaggaagacacatacaccgagcgctcgcaccgaaaacggcgtaaaagcagctccggtcacaccgaggacgatgagcgtaagaaaaacaagaggcgtcactcggatccggcaaaaccgcacatccacgatgctctgcagcatgatgagccaaccaaggtagtgaaatcgttcgaggcagatgctctagaaagtgtccctactgaaatccaggacaagggttatgttgagctggatgaactgaaacataagaacaacacaccggatctacccaaaatgcccacgaacttcgttctgggtagccccagttcacctatcgacttaaccgacgactcttcgccctatggcaagtttgtctctcaattcaaggatgttttgcttcaaaaggaacgtgttgatgacatcggggagttcaaagatcttgacaagagcaacgaagaaactcttacacgtcgcttgtcacttgacgcccggaaagaggatattcatgagaaccgatcgcctgaaaaagtggtcgaaataaagccgtcgaagcgtcgtgagtcaagcaaagaatcaaagatagaaagaaaccgacgcaagcgcgaacggagaaagtcgcgcaacaaacattacatgaaaggtgactccgctggtggagcagagaagcagcttgaaggccattccgccgatggggcatataaagaccgaattccgccttccactccgccgcaaacctcttctgagaattttaatggaagtaatgcaagcaaacgaagctccagtcagcccccgctacccgccgatccaaatctgtgggatgaggatttttgagtgccagtgatttgccaggtatgactccaagtgatgaggtccagtctaagtatttcttaagagccgacaactccagagttggctcgaaacgtaagcgggaaacggcttcctcgctgtacaatttgtctatcccccctcaaacccgaaagctgttgaaagatttgaatctgccctcggacttcttgtcgtcggattcttccttgagtgatgcaccgagtgattttgattttgattctgattgggatgatctagatggtcatccgttgcatattcatatcaatatatccccccctaaaagcccatgtcttgtcccccaatgtacaaaccctgagcctaaaactccggtgaaatgcacctctctcgttaatccagaacgcgttaaaacccctcaagccaaagccccgaagcattctccttatttcccacctgtgctagttaattccgaatcttgcctcccgtttccccctatcgatgggtcttctttcggactcatccaggaacagcttgcacacgacccctttcgtttactcattgcaaccatttttctcaatcgaacccgcggtggtgttgccctaccggtcttgttcaaggtttttgaacgatatcctacgatcgaggcaatggcagaagcagactcaccagaactcgtctcgatgataaactgtttggggtttcaaaaccagcgtgcaaggaaatgcattacattggcacaaacatggctatcagaccccccggacaaaagaagaagatatcgcaagctccactatccacgaaaactggacggtcgaaatgttggtcgtgaagaatgcattgatgaagatgatttgcgagtcgcatgggagattgcacatctacccggagttggagcatattcccttgatagctggaggattttctgtcgcgatgagttgcgggggaaagcctccgattggaaagggacggatgcgacagaggtcgggtttgtgcctgaatggaaatgcgttctaccacaggacaaggagctacgtgcctatcttacatggatgtggttgaaggaaggatggatttgggattacaacacgggtgacttgacactcgcgagcgacaagatgatgagagctgcgcagaatggaggggtcgctcatgaagaagaggggagttgggtactagagacatcccctgtcaaggcagtaaatggattgcatgaatcggattgatatcctgaataccaaaagtttcaaatccactgatgaagttacctgtatatgttgccttaggcagtagaatctgtgttcccccagacaggtttcagctgagagggcgtttgtatatatctcatcggatttcaggcttccatgcagcaaaaaccacgtcagttgaaagagcggggccgagatcgttcaccgcataatcgcatagtgcgtttctttccacttccaacaatttcatgcgtcgtacctgaatgaggttattcgtttctttttttcaacttgagatcacattttcttcccccagaccccagacactcggaatgccggattggttcccgcacattgcgaccctaagcgacaagtcacgacggcagcccgaactaagcgccaggagaattggagacaaaaataggatcacattccgctcagtggcagtgcgactctagacaggtaacggacgattgacccttcgcgcggtccacaactcgattttacggatttcgccatgtttcctgttagactaaaccgcgacgataggaagtcgaagaccatcaagggcacgaagagcaagacaaacaagacaaacaggaagacctcaaccaaggaccccgaggatcctcccacggctcgctcatcaacttcccaacgcaggtcctccatgcctggactcgagaagtcggaggcagcctcgttccttgagtcgagaactagtctaccgtatcctaccttctcgaaggcccacagcaaggaaggcgtccgagcgagtattcctaccccggacccgaccgacttgacacatgacgaggggaagaacggtcaccgcgaggatcaccatgcgcctcctagtccgcccctgactggtctcgaccaagagtcgaggaagggcagtattgggaaaggcagtattatcaacgaggatgagaaggagacagacaaacccaagaagagaacaagtatcaaaatcagagcctccgaagtcaacaggtcctcatcgagtctccggtcgaaaccagatgataccaccaagtccaagtccagcaagacgtcacgaacggagacccctacaaaacacagaacgtccaaggatgagggtgaagctttgcctcgatcatcgagttacaagtctaagacgaaggtttccgatgacagaacgctgcccaaacgatcgagtcgctcgacaatgtctgcctcacagtcgaacgtcacacttcgtgataacggtggagagtcagtcaacgggtctgatgcaacgtctattgcccctaatcagcagcattcggcgccacgaaaacccatgaccccgcccgcgaagcctccctctcgcacgcagaaccgatcggccatgtcccgtcgtcgcactgctagcgacgagtcgatcgattttgtgaaaccagtgaatccaaattcgttcggcgcacccccgccgcccccacctccacctgaaatgcctgctactatccctcgagtcgattatttgctgaaaaatggtggtctggaaaacaaggtctcgagggcactgctggctagcctcgggcaaaatgatccattttcacaaggacaacctcagtcccaggctaacgccggcaaaatctttgatccatatcaccgtttactagacgactaccaaaaggtcatgagtaagaatggatctctggccgtggcaacaggctatcggtctgtcgcccggcgtttattggatcgcctcgaagccgtgttcgcgcgcgacatctcttcggagccatgtagctgtcagatatgcgatcgaacggaggcagacggtcgacctgatggggtgagctggggcgaggttttggagctcgtgtctggccgcagggaacttcctatgtggcctcccttcacgatggcaccaaccaccgtagataccggcgtgccaggcgatgagcatattccaatgcagaagcttgacgttgacgttcctgaggaataccgggaccacttcatacggcaatctcgaaagacgaaggtcgctgtcgacaaatggctttatgagcagaaagatccaggcaccagtgctcccaacgaggtcgacgacgaaacgttgaccttcgccatgcttacgcatctcgaaccccgccagcggtcgttgttatgctctttgctcggcatcaattcctctactcctgtcccgcggtctgacgatgagatgccccggcacaagccttcggcgcttatctcatcggcctcggccatccagcgtctttaccgactaccctccctccctcgcgatccagaaactgctatgtacatgttgaataaccctacactccaccatgtcctcgccaccctttccgccatcagcgatgacgagtgggaaattctcatctccggccgcttcgacggattcctccgcagcggcgcagaagacccaggccccaccaccggcgctcgctggagcggaagtcgctccaacacacccttaggcggcagtgtctcccgaggaccgacacccaactatatggacggcagcttccgaccctcaagccaagttaacggcgcaccctcatcccccgcctcgttcggcgggccgattgctctagacgaggaaaccgaaatcgccgccttagcagaagtcgagcgcgacattttcctcggaatggaagcccttgaagatgctttcgaagccctccactgcaaagctgaagtcgttcgacgtgcattgcgcgaacgcggcgccggcctctccgtggcaagccaaagccgccggggttccttcgtcgaagcgcgcctaggcacacccttctcgggtgtcggaacgtgggaaagcggtggtgaagacgacttcctcgacgacgagtgctctcttgcgcccgatgactcggctagtaatatcagctcgaaccggcgtcgtcggcctaagagacgcacggagcgacgcacgcctgcgcctgtcgaggaggaagacgaggaagatgatggtcttggccgtcgagatacgcgtccctcgaggcgtagatagatcggcacctggatttgaatgggaataattcttttcgatctacggagtacgtacagcgttggaattatccgaggactgtttgctggatagcattggatatggatgtaactgttgctgttgcaatgggcttgatgaactcatgataccccctcctactttcttgtcctggcttttcttcttcgtttctcgcttgttcttttgcttaactccacgcttggcctcctgctactttttatattttgctcttttgatgatttatgaatactacgagcttccctccccctaacgactagccatgcctttaggctatgatacaagtttgattgagcatatcccagcggttgagttgttagtactgtgcaatacaagtgaattggatctaggtattgaaatgatccctcgggacggactagataattaattccaacaaatagtagaaaggctcagtatcaacccccaacatttgacgcaatttatgtcttgtcgatcaacacacaccgccatctactccagctgccgcaaaggaagccggagaacacccccggcggcaacaggagccgagccgcaccgcgtcgtggaaaaaagtacgatgtacgaatcgcaagccgtcatcgggtatatcttacgacatcatccctgttgggtggatcaaatgaaccaatctcgacacggccaacggtttgtgatgcggacggccccaaaccagccgctccagccgcactgacaagcgtatgctaaatgacgcaaagaacaccatttgcggagtgcactgcaaagtattgatcaccggagtctcagggtatgatctgggtgatcctcggaagaagaaactagttgtgctaaagatcgataggctaagatcataagttaactaaaataggaaaacgggcccgtcaatcgaagcttcaattatgataggctgtgtgttatgtgtacacggctgaggatggagcgctctataagcggactatttaatatttgattaatgatgtcttaggcacattttggttaaattgcatgatgtatttgatcaatagatatctaaaaatgcaaaggagccccgagtgaagatgtatgctttaaggtcaaagagtggggattcggcaattggatagtcgatttagtgcttacaacataggggcatgcagtctgaaactgagctagttggatttctggaaggttaaggttctgaaaagaaaaggatgagttggaaaaggttgctggggatttaccccaaattcatcgccggcacccaatataaattcggctgttcccgattacccctgacgggatatctgagacatttccaaattgaggcattcttttgcgtaagcaccagtttgacgatttactccgttgatctcctccactagtccgtgctagccagctggaatcataccggacataaggagcctcctttatccagcttctcggaacactcgtgtctgtcccgtctactccacttgacagacgatgttcgtggtcggagcggatcgaagcttagcccggcttacggcagtgtctaactagtgtgctatatcggattttcctgtctatagtacggatctatttataagaaaggggattgtatctctataaggctgcatactttctatttgtaaaggtatatatatcagaagggggttaggcataaaaaagaggaaatataaatttgtagagaacgaaataattattactccgtagttaaagactgccgtaacctggtccaatcacatagccaagaggtcaagtgaccccaaatgccctaaatacataatccttttgttaaacaacacgggctattgcggggtggatctcacataaaattatgttcatgccggggtcctggcccactcgcccacattgtgctttgtattattttttctttgttcacttgatgtattgaatatgatatagcctaccgatcgatcttacgatcgtaaatgcctttgagcggttcagaaaagagtctgctggcggcttttatagaaagagatggcgatactttcaatatcgtagagtacaaagaatttaagatacacttgtcccaattcaccctagctagtactccagaagcctcggccccaaatggaatactacatatagggtattaaaggtccaagcccgctgtcaattacccaatatggcgctttggccttggatggattttgcgccttattagtggttctgagaatcaggggtgcgtctcctatggaacccgtttctaaacggccaatgcccttttttagtatgcacttaataccaactaagctaaactttgcggccgtttcattcgacatcccgtggcaaacttgtgtccttttacccacatgagcacgtatgccctaaataggataagtggagtacaaatacgctgtatacggggattcacagctctgggccgtgaactattatggagatcggaatccttcgtccaggtgtccatattttccactgactcgaacttgccgtggataacccagccattgaccgacaaaatggttaaaccggtttaagtctcattctcctatccttgcctaagttcaattagtcctagtagcctgggtttgtttctttctctctcattgaatctgaatttcacctttcatgtctgtcacctcttccctccacgagctattcttaatcttccactgcaggcagcgcgtggtggagatatagtatttaccaaattcaacctctcgtctattcacattcgcgtcggccttggatgtcgcctcttgttgccctggacagtgaccccaagaacgtgctttgcagcctacctttcgaccaggcaatgatagcagaatcttagaaccgaaaccatccgcaaacacattcgaccatgtcggcagtcattctcatgggcttgatacccggaaacaagcactcgttggcagctcgcttgaccacctccgctcaacttactatcgaccctctttcagaatcacatcgagaaggtctaatagcaatttcagtcttggccttcctctctctcattgcaacatcaatactcctcggtttcattacctatcgactttttttctggcgcagcagttatacacgttacatcggttacaaccagtacatcattcttatctacaatcttgttctggcggactttctacagtcacttggatttattatttctctacaatggatcttgacaaacaagattgagtctagttccgccgcatgctttcttcaagggctgtggctgcaaattggggatcccagcagtggcctgttcgtgtttgctatcgcgttccacacattccttttagtcgtctgtggacgtaaaatgtcccacaagttcttcgtctcattcgtggtcggcatttgggcatttgttgttttaatgttaatcatcccattagcacaacacggtcctggtatctttgtgctttccggggcctggtgctggatcagcgatgactacgaaatcgcgcggttatggactcactacgtctggattttcctcgccgagttcggcacaatcattctctacgctgtgatgtatttccagctgcgccgacagatttccgcctccgctatcctcggcaacagccagctggagagtctcaagcgcctacgccgcgtcgtgggctacatgaccatctacccaatcatctacctcgttctatcgctacccatcgccgcaagccgcatggccacaagccacggcgatacacccaacattgtattcttctgctgttctggggccatcatcaccagctccgggctggtcgacgtcatcctgtacactctcacccgccgcaacttgatcatcgactcggaacccagcgaagaccgctcctatcacaattacaacggcagcaaaggcaaacgaggtgggaacaacctaactaccgttacggctgatcccaagcacacagtcggcggcacttacattgatgagattgaccgcaacggctcgacggataacatcgtttcacccaccgcacatggctaccacgcccgtgatcaggaaatgatgccgatcggacaggtctaccaagaaaccaccattgtaatcacacacgagcctgcttatcccaccgaggaatccagtaagcgctctagcaaggagaacttccccgaccgtccatctcaatcaggatggcggggatgaacctttcttcacttctattcctatatccattttgtgatatgatgccctcaatacccatttcctgtcactaccacaaatattcgttccctcaagctgttttcactaccgcttcatgtctctctttatctccctcgtcttcctctgttttcttcctcttcctatgtctgtatactctcatcctaatccttttttatgacgaaaccttgtatgtatattttgaaaagggacagaacgtgttcgtccccacgtgaaccatggcgattcgcatgtgatagttaattatttcgaatctgaaggctcgtgatttggttttgattgaaagaatatccacataatttaaatcatcatcaagagccattccatcgtgactgaaaatggtatcccaaaacgctaatgagtttcagcagtcgaaggatattcccatcaagaaagctttttacagaaatatacacgttcgaacccatcctccattctgcgatctgtttccataaaccctagtttcgcgtaaaacccaatattctcaaacatcttcacattagtgaataatgttacactgggaagcctctgattttgagcttccgcttccgcgtggttgatcatatagtatccgtagcctcgcccttgcgctgttggatcgactactacgttgtcgattttgagcgagtttgtctgctcgtcctggtggcaggtgatcgaccccacgatccgctcattatctctcagaacgagaacttcatacgtttggagcacatggtcccagtcttctgtcatcggtgctggtggtttgccaatgcgttcaatgtatttcgaataggcggcatcaaccatctctttgatggctggtatgtcttcgactattgctttgtgaagtgcgagcttgctgtccgatggggaccttgggctgagagttatggtcatgatgagaaaatacagagtgaacagtttaaaaatactttatttgggagtttcgcgaggagaatagtcacaacatattttcccttgagttgtgagtcagaactaccccgccaagcgacaactttattgcactctttactcaagccagacatgattctcagaataaatccaatttgacggagctaagctaagaccttcaattcgacatgtatacttcgaagaaacatgatgtatcacaattgacaatcacgcagggggaagtgcaagcttcccagacgaccaacgcccctgagtccatacatactctgtaatcgccgaaatctcatgaccagcctggaaatacacccgaacctccggacgcgggccattcatccagctgatgcaatcaatctgcgttcccgggatacagtccgcgtggaagtgtccctcggtccaggacttgccgtcgtacaccatctcacacatcgtattcgaagtattgtaaaagacccgaattccgacggtttccgagctggtcatatgactagtgcaagctatagacgtccgaggttggacttttgggagcttggcgcctccaccataccagccgcgtttgctgtcgtagcacttctcgatgatgccatgctccatatgctggaaatacacactatcaatagctttagtactatcccgtgaaagaaatcccgaaagtagcaattaccggatatttggttcagaagtcttaaacacggtgcacgttatgtctgtgccgggcattgctgagcccaggttcgacattgtctcccagtttccattatctattccgctgtgagcagcggtatagcaataatgggttgatgacttacctttcagtccgtattcctgaatcgtgttgtttgccatctgacaatagaccctgttggtcacgtcgggtccattgaggtgacaagcggccagctttgaacacggtgctgtaataaaacactttttaccaagactaccttcataccaccctttagatttgtcataagtaacatcattgatagtgttctcggtggagaggtagtagactcggatctatgcaggttttgttaattgtgctcttgatagcttttcccggagaacactgacattttcaaggtcacttgaggtgcaggctagaggcgagtagggcttggccgaagcaacgatattcttctctgttccgttgctccatttgtcatcgtacttcgactcgcggatctttcccaggacatcttgcatatagacccgtaggtcactgcctgaattacaggccgcgatggaagtccctaaagaaatgatatcagccctgatggtttaaggagagtaggatattccatacgaaagacaatctcgtgggcttcgttgctgggcataatgcgagagttattttgatgtaatgagctggagtttttcgcgctgataacaagaatatttttatttagatcggaaagatcgaagaggtttataactgcaaaaggccaacattatgttttgcatgtcacgaggtcatacaagctgcctatattgggcacgaattctggagcattggaagagctctgattgtcggaatatgcgatgctttacacatgagtagccaatattgtggcacatcacgcaaacaaggcccaagaccacgaggagctcgcggattgtcaacgcacaagggaacaaacacttgttttgaacggaatgaacctaccggaatctccggtgggtggcaaatggtttcattaattgaggctctgggcaacgttgaatatgatgccatgtgatgggcggttgattgtactacgctatgctatatatgcagtcatcaagtcaagattccccgtcgtacagttcagagtaacagctcaagaatatgcatttggcaagtattctcggcgatatttcacgaaggagagaaatttggtgttttttcccgatgatccagtcgagaagtttgacattcgtaggctcatgtaggccaactggtcgcctacgtactcatcgagctccagattttatgatttcagaaagcctctcacctgttgaatcacagcctgttcgtgattctggtgttaacgtccggtacaatgactatctctccgctatcaaaatattgctcgaactctgaacagacaggaagtttactacgaagggaaaatatgtcactttcttttccaaaaatagcatcaactgttgtttgtccgtgcataaccgaacaaatatgtagcaacaatataacggaatgatttccattggtgtattccgtattattaggcaccctccatcataacccccttccagtcactttgctcgtttttgtttttcttgcgcttgtcagcgcccgtccacgataatgtttatgctcatctttagtgtagtgaaatgccgtataaatgtggctcggaggtctctctagccctagcccaagggtcgatcatgatatgctcggcctatcatatgcctagtcagtctaagaataattgtgtagaaactcactagttggtactgggatcgtaaatattaggattgctagtagtttcactagataaataagtgagcgaaatgggctttttgaggcgccagactctcagattcttcatataattaattcgggttgtatgataaaagctcggcgtgacataggatcagttggataagtgcgcgcgatcctatcaagtcacgtgattatgtcttatcttatctacgcagcgtagataaaccatgtgatacatcacgtgcagtattttctcgccaataattgctgtgtcagattgatttctgcctccgcatccatcatctttcatcatgcgaagaatactacaacggcttatgtggttatggacctagcagtttaatgcaatggcgaactaaatccgattgaatcggatgattttgatcctatcatggcgcagatacggcggcaacatgaggcggtggattttgagattaaaaaacgatgagcagcagtccacagatattacaggccgtcaacatggatattcgatactcggctgctgggaaggacggttcaccacagcgaaggaagcactcgatctatatctacaatcatgttcggtaccggtcatttcacatcgacaacgccgtgtttttctaaggttgaccaatgagatgctgctctgcaggtcgacattgaagttatcgtactatattatctctgtatcacccgaaaccatttcgaggactggacatagaattcgatctctggacgaggcaagtagttttacatgagaaatatgccaggacacctgtcttccacggggatgacaaccttggaatggagcagctgacgttagtgcataactacatagtctgatttaaatggtatgtagcccagaaaatgcgcctcgtacagctatctcgaggctaatcgcgctcaagcggagccaacccgctgaactcgatttagcccccgatcgatccgcattgcattgcagtcaggtccaggtaaactcggtcgggtcgactgatcaaaacctcaattgattgaagtgtcacattgcaaggagtgcgccaatatcatggcttgtactccgtgcagcgcctgataaataaatactccaccccccttgatagagtggaataggaagattaccaaattgactgagatcagactagttttgctgcaaggctagttccttagattaccgtccacctgcgtacatcttcgtgtttcagtctcacaacgaggcgatcattgcagatcaggggtctagggatccactatagtggaccaggtttattttgatcgccaatcaaggcaccacagccgcaagaatgtacaacaaatatcttgttagaatatgctgtaatatgtctaagagccgggcttgaatattgaaaccgtcttatttaaagctaacatgtgttgccaattagtatctccgctcgagaaggtccgacccattcttttttttttaatatctcccaaccatgttgttctctcgcaacggtcttctggcacctttggttgtttcgctgcttctggcaggaaatactgtcgctgatgacgcaggaacgagagcccggaatgcactccaaacccttcagggctggtataacccccaaagtggcatttgggatacctgtggctggtgggatggtgccagctgcatgaatacagttgcagatttagctgcccttgacccatcggtgatggatacagcgacatatgtcttcaataatacattccacgtggggccagtgtccaatccgaatcccggacctgagcataagactgtttacactcgtgacaaccaaccacaaacttccgtcaatgctagccagtggctggatcaagcttacgacgatgatggatggtgggcccttgcatggattgcagcatacgatgtcaccaaggaggggacgtacctagaattggccgagggaatttttgagagcttggtatgtatagtgtcagattctgtgtgtacttggacatttgttgattctttctaggctgacgcatggggcaccaactgtggtggtggcggtattccttggaatcctaccagtacatacgtgaattcgattacgaatgagctatttctctctgtcgcagcacaccttgcaaaccgagtcgccgagagaaaacagtattatgtccgctgggctcagaaggaatgggactggttcacggcccaggccttcattggtccaaacggtaccatcaatgatggccttttggacaattgtcagaacaacggagatactgtgtaggcatcatgttctctgattatctttatttttggctaacctgctgcagatggtcgtacaatcaaggagttgtcctcggtggattggttgaattgaacatagcggcacccaataacacatacctgccatctgcaaacaagattgcaaatgcagccattgagacattggccgattcgaacaatatcatccatgaattctgtgagccacaatgccttccagatggcacacaattcaagggaatttttattcgcaatctacggatgttgcagaaagcatctccacatgatatttaccggaaggtaatagataactgtgcaaatagcatttggaataatgatcgcaatgaacaaggacagttcggcgtcaactgggctggtcctattgaggcagtagtggatgcatccacacacagctcggccctcgatgccctggtcgcagctgttgctgcgttgggtacctagcgatggaatccagaaccatggatatttctttttttttttttaatattttctttcggctattctttcaagtatataattcttcgttctacatatataccaaacatcagaccagctttcacggttcaattgttttattctcgctttctagtatgactgtgctcgcttggtccagtcaggctgtggggcggcctgaggtctcgtgcatcctgactgaatgacggatgtgggaactaattccaaccttcccagtgttcaccctgtctgtcctgtgaccacactgtcaagcctcgtggttgataataccccctggaatcgggaaagccgtctgggggccaacgtggttgactaaattagatagaaattagagttggtggattccggatgaagaaccatggaaccgtgtcccatgaaccaaagggtcacatactatattttccgaattgatacccgttgacgaacagctggcatctgtaattgttgcctcgagtattttgcttagttatatcctgaatcgaattgttaaacaccacgctcattgcaatatcccatccactggggatattcaacccgaaggatactgcatagatcctaacacctgcgtgcgataagccatctgtgactgggtttgaaaattcccattttgagcttggtggattaggataatggtattcttgtctctcggcatacatgtcatcttcattcaaaggaccacgagctagatcctgatactgctcttctccaaggttgcctgtcaatttccacgagacatcggattgggcgtgacccgaaatctcatagtttaaaataccccgtgggaacttgagtgaatcagtgccaggagcccctttatcttgacccatatgatcacccagcactgagttcacatattggcttccctgcgacaaaggggatgacagcgacatgctgtggacaacagtggagtcggcgctcgacccgatccacgagccaaggaatgtattattcaaccatacagtctgtccgaatcctgcgccactagacaattcaaccaaaaattatattcttggccattggcgttaaaatggccacggtatagcaaagaccctgtgtgatatccgtagtccatggagtacagactactcggagtatccagctgttgtggactgtgtgtggagcttcgtgtacagcgcgtccaagctgagtcatcgtacaacacctggatctcagggagagaattgatgaactttcattccaggttggacaaatcaggaatgtccaacatgggaagattatacctgacagttccctggaggttcccattgggcatttttgaagtctatagtacttccccattgaaggtgatgcctttcagctttgtagctgaactaggtatgacctcgattattgttgtagcattcacatcccctgtcaggcgcaactgcttatttatcagatcagctgtgcggataagatatccggcctcgacaactaccaggctcttcgatggcgatgtgtaatttccaattggacctgatacgggcaactccagcacccagtagttgtatgcctcattccgccagagcaggtatacctgaagatctgctacccgaatgatgagtcgtgctggtgtaacatgccaccttacaacccaagcagatccgtgttgttttatttcgatgctgtctccttcgataacggttggctttacaagatgactaggcagaccaaatttgtgtgtttctctcgcgcctccgtacagaattactacacgtgtcgatcccgacccgcatgcccatgtgaatatttctgcagagtagatcagattgatcccgccgacatcgtaatctgtaacgtgaaattttgaatcacgtctattcaacgtcaggtggcctccatagttgaggaattttgatgtccccaatacttgtcaacaatgtgagagtataccatgtgttatcgactgaagtgaagtcggcatgtctgacaacgtaaagattcgtcctcgtcctatttccaagtagagcagtcacagctattgaggagggtgcgccgtaagtaccgttcactccaagatgaggagttgccgtcaaatatccgggggaactttgaggaagttagcctcgagtttttgttcactatatttctcgcgccagatcgtcctctcttctgtaatcgcttcaccgtagtcatatgatgtatgcccgcccatatagccgagattaccccagttggtgcccccgaaagtctgaggagaattccacaataggcattacaatataaaatcaagaggttgtatggacccaacatgtaaatgttgaagatcttcacgccaaaactgtagttgttcttgtacaaaactctgacagcctctttgtttaccaaccggccgcacatgtcttggaccagccctcccctataattacattagttcctttcatatggtaaaagcaagaatcgacctaccatccttcatcagaccctccttggaactcagcaatcgaaaaggcgtcgttggactctgccgtctgtgcgtgacttgccagtcatatggaaacttgtaattaggcaaaacagtaaaatttgcgcctaagggggggaatctgtcagccttacagcacgtataacattgaggtacgttggaaacaagctcacaattatagcgcaaggggtacgcatcaatagcgttgatatcgactgcgcccttccctgaccccggcgcgaagtatcccataaccaagttatcattcacaattgaaggaacagtaagaccttcatcaagcagctgctcttcaacgtataccatataattccgattcatctcagtcgggaagtcagtcactccaagccaggtggagtacttgttctctggctgaaccatgatcactgggccaccatttgtgatctgtcccctgtcaatgatccggcccagtatcgatatgtaatttgctgttgcattcaggtattcaggatcgtcggatggaataacccccttttctcgtagaacccacccaggtattccaccagcagttgtttctgcgttgatgtacggtcccggtcgagcgatgaggtataagccagcttggcttgctacgtcaaaaccccatctaagctccatatcccgtcggtgataacgtgtccaggattcccttctacaaggctccaatcaatgtagaatgagaccccggtgaagcccatactctttgttttttgacacgtcgagccaaagacctgggactgggagtcgaaggggtgaaattcgccaggaaagatcatgagccgctctccgcgtattattatagaatgttggtcccacgccacctatccctaatgcgttagtgaaatgatactatcagggtgatactattctcactagatcttgtagccccttttttttgaggtggagtatggcttttaatagacgctaaaaccaatgatgcaactgcagaaagcagagttatcaatggtgacgttttgaacaacatctttcaggggtggtaatcaaactatgagccggcagcgagcaagataatcgagcgagacaataaggcaaacggaaattccaaaatgtttctaagcttgaaatttgcatctatttccccgcattaacaaaaccgactccgcagcaagaagactgctagcattgatcctattgaagggatatttcgccaattaaccagcgcaccggtaaaactactacctgtcgatcatttcataaactacggagtagacaatgctaagtacgagacatcatcccctctatattcctgacacctaccgaaaatcaggctaaaccagattaccctaacgtaattcacatacaagccgccaccacatacgacccgccatctccaaaacatatagtaaacaccatatttgacaaccttatatcttaacaacagtgttattccctgatctaattattcctagatagcgaccgataagaatctttaactcagcatctcaatattaaggtaactaaacctctactattatggtttcaaaaattacgttgcctagagcttgaaatatcttgaaatatatatatcacgatcacaatgtcataaatcttatctaaacttagtaaagagactagatatcacctaagaagtatcgagctataagaaaaacctcttatagactaccgttgttaaaatatcaggttgtaatttatcatatttactatgtgttttggagatggcgggtcgcttgtggtggcggctcgcatgtgaattacgttagtttctggggaaattacatcagtttctggggaaattacatcatggcgagctcatttcgccatcctatcctatgcctcatttctagccactcgggatgagatttcccttcgacacctctaccgaatactaagtgccaaactcttgatccaacaatggccgcacatatcaagccactcatccttcacgcccatgccacgggcccaaacccagtcaaaatagccatggcactcgaggcgctccatgtcccattcgaagtgaagttgtgggactttagcgacaatccgaaaagtggcgtgaagggcacagaatttctcaaaatcaacgagaacgggcgcgttcctgccatcgaagatcccaacaccggtgtcgtctcgtgggaatccggggcatgcatgaactacgtccgccgtgtttatgacaatggtaatacgattggtccgtctggcgactcggctcaagatcttgtggattttgaaaagtgggagtatttcttgttgacaacgcttggccccatgacaggacaggcaacctggtttaagtcagtgactgtgaattcggaagaaatccccggttgatacttactctttatttgttcagaaactataacccacaaaagaatgatgatgcactccagcgatatacagcgcagagctatcgctgctacgatgttcttgagggtcagttgaaaaagactcacggtgaaagcattgtacccagtcgggtcactgccgttgattatcattttgagccttgggtacgcgcctcgtcctacgctggcctttcacttgacaactatcctttgatcaagaagtggctggggcttatggcgacacgggaagaagtccaggaagcatacgtcaaggttcaaggtaaaaagtgaatgagatcataccagggaaggacttaactaggactagaatcaggtagtcatgaaaaattacaaatccaaatacaaacctcaagtatgaagtaaatatcatgttgtacatttttgtctctatatatttttgatcacgaatccaaaatatcaaattttgaatgtccgatagctgcctacctttgtactccaggcaccagaacctttgggacatcaaggagatatagcaaatatgcctttccattgtgcgacttgcttggcattttgcctccacgtacgttgacctgcatagcctggtgtacaagcttaggctcaggcatctggctgtcccgctgagttctccacttcacaaactcatcctctgtcgtgtgcttcttcatgtgcttgtttttcttctcctgctcgccaaccgtaacatacggcaatggctcccgtgcagtatattcgttggtaggaggataatcatggcctgtgtataatctcgtttccggcgggaaagaaaggaggcgtttcatcgagcggtaaagttcccgaggatcgccacctgggaagtcacatcggccactgccaacatctggattgaacatacagtctccggtgaaaatattgctcccgaatttgtagccgccgtggtctggagtatgtcccgggagatggagggcgctgctggtgacttggccaatctggaatatttcatcgggctggaagaggtggtcgaaggcgttgtcgatatctgctttcgcgattgcatattttcgtgcgaaaaaactttggacgatcttgacattctcaccgatgcagatcggtgcgtgaggttccccgcgggaccagagaatttgttggatatagtaggctgctgagaggtggtctgcatgggcatgtgtctctagcaacatcatgatagtgtattcatttttcatagcataatcaatgatttgatccgcagattcagaggtaatagcgaagttcacagtatcataatccaggactgggtcgatgatggcagcttcctttgtttcaggacaagctactagatactgccaagagcaagtcttaggctcgaagaaagggtgaactctcggttccactgtgttggccatcttgaagatcacttgcagaatatgctttcaagttgaaaagtaattaaagttggtgtttcctcgagtacgagcctggctggttggaattacgtatttatagaatcatcagtgccacccagcatagatctagccttaccctacctcaaatccagacagatgggctcagcaatccattaagtgtccatgtttttattctcattgtaacttcctatggggttcatgctctcaagtcttttgggtgatgttttcattttcctccgtgccaggacagcgtattacttcagtcaaaatacagactcaaacatacacccctagaatgatatattccgtgactgcgactatatagctatgaaacaaaagaggatatgattaaccacccccatgtattccatgggactcgtcaagtgactatgagaaccacgacttcgggaacattcacgagaaagcccggttcgctatttggtacagacctacaggacttcaataacttcttatgttgatgcactgccactggtaggtaagttagcaggtgctacgggaccctcctcttacgctatctcatggtgcctatagggagatggtggccagggggatgagaggcaggagtccttttataccccaaacccacgtgccttcctacagtgcccaggtgccttgcaccttccctaagcaacagacatccaaggttggaaagattcttgctgagtcagaattatatgattccaaccttccaagttctacctttccgtttgggcacgaagagaaattaaccagattaaggagattaacggcaggaacagtgagaataagactttggtgcctcttagccgtatctaccgtatgagtttacagtctacgaaaatagaccaccgactgcttctggtttcaagggaataaacttcaattgataaatgactgtattcaaatttctttctaacccattgaaatctctttcttacatctgtctgtttagtgctaaccattgacccattgttttgtcaagcgaccgtccttgcagtcgcagacatttcacgcatacaaagacatcccaggtaggagagattgtctgtaggtatggaatgcaaattttcttcgcggattctccattagaaagcgaaaccactaaaaccgataggcgacgatcgtttcccgatagaaccgtcgctgacagaccattgatcaatttcgctctggtcacttggtacgtcccatcgagcggtttgaagatcaagagtgtgagcggcttgattgaatcggcactgccagctcttcacggccttgcatccgggcttttggcataggtggcccatgtagcatttgattgatcggcaagcgccgccccgagtgcaggggtgctggaggagcatgtatcgcagaacctcaatgatcacttcagagacatcgctgtggtcataggtacagctcatgtcaccgcactctcccgacagatggtagctattacaaactttgtgttcttttgctcgagcgtggtactgatcaaaggcttcaggcgacgggtgaggatagtatgggtcgatacggtccccgtctttattgactgggatgaattcttccgttttgatactcggcaaggggagcatggacctaaagaaatcttcggagcgcccgacaactgtaggggaagaccacagttgtttaggtgaatcacctgcacctgagtgtttaggcgacggctgatgattcaatgactggttcggcataacgtgctgtttattgcagccgatgccgaacttgcagataccctagataaatgtcaattaagaacttactcgcgactgacatcatgtgatcaggaaaaataccttttggaagtgcttgcagattggtttggtggtatttgcaccattagcaccatttgtgccattagatacgtagtgtgcactgttttcaccgttgaatttggccacagtcggagacgcagccgggcctgtaggtggcttgctgttaagtagaggggtagacatgaaaaccgaaggtaattctctgatagggagatccaagtcctcgaattcacgatggaaaccagcggctttgatgagggtgatacggtcacctctgcctctatatggcgtcagcagggagccgtatccagtgtcgtggcagccagcaaaatagatatggcggcattggttgagttcaacgaagagacggaacatttcttgatttcacagcacacatcagtacaacaacaagattgttcatgccggattgttcattacctctgatcttgaaatcactgccttccttcttctctgcagcatcgacataatcaaatagctcttgtgcacgggtaaatgatgaagtaaatggtgacatggatcgagcctcgtggcccataagtccagctcgagctaacgccttcgacaaaccgagaacgttcgcatagacacgaaccatgatccgacactgttcggcctgcattcccattgtcgaatgcataagctcttttatagagtcgctcagttcgcgggcagcatttatgccaccttcgctgccatgcttcaagaaatgttctttgaactagaagatgtgttagtcgatggatttgataccgaggaaagcaagacagtctcaccagatatccgtctccatctacaaggacaaggacaaaagggttacgatcctgattgattgtcagtttcaagctctatggcatcctgtaagcctgcctcctacctgccctctggcctgtcttttgtatttctctcggccttctttaacctcttcatagtcacttttgagcgagctatagtcgtctaacagactcttgaattggctgagcaagtcctgcagattgtcatgctgcttttgctgctctcgcgataaggacagtagatgcccattcaaggaatctatatcagaatccctcagcatcttgtcggaggtaccgggacggcatgtgccagtcccataagccaagttaattcaacgaaggctgcgagcattcgattgaaatttgaaagaagaacgattttctaaactgtgaggtgcgctggacagctatggtggggaaatttgtttggcttgttgggcggtcaatggcccctaggtatcaggtgacccctggcggaaagtacaagacgttagttgtgtcacgtgcaagacttccccataaacattccaaaagtggactagcgttaacgcgacccgcgttcagcctagtggtctcgctcctatccaagttgcaaaccacatccaacgtatacaacgcatgagcacgaaaaagcgaggagctactcgatctagctacgcatggaatagatatgacgactatctcccgtcatattgcggttatttctcgtttatcttaagggattttggttttggaggctaagagtcactaggtcgatcacctgtctaaagctctggcaaagagtatgaggtagcatgccgagacagcattaatcctgtatcgctttatagtagctctaatttgtctgaagtactgtggtctccatacattgtatcaccagggagtagctcctgtatagttatgaaacacttactctgcttattacaaacagacccaaccaccatgtctaagtaacaaaccaaaactagacctattgatttggaataatcttcaatgtaaggatttgctcctaggaatacatttttttgaccgcacgataccatcctcgggccttgcttctgctcgggtgcgggcagtgaacgggtttcagacaactagtatagccaaaaaaaccacaatagtacgtggtgatgagaaattacattgcaaatactctgcactaacaaggggactcgtttaaaataggttaataataacggtgattgaagtggtttccagcgggaaccattcattattaatttatttagggaatagagaaagaaggaaaaaaagaacacatgaaaaaggaaaaaggagatgatagaagagacacaagaatatcaatctcttgggagacctcttcgtggtatgcatacacatcatgtgacctcaaccccagcgccagacatcttaggctcctttgttcctttttcccgtattccccttttctgcttttgttttttttccctgaacgtctgtcgggacttgattatccaggtcccaggcgattccccattcttctaatcatggcggttccatgcaatatccggggttcggcttcccagctcttctatcaagaccaacaatgtcctcaatatcaagcccttttggctatcaccgagatgccgcatccagatcgttctattgtgggcgcttttctcatggatgcacgaaatccccaggaagcagcccgctacttcttacgagagaccgcaatcgatggcacctcgcactccgtcccagcaaggacaatttcggaattcctctcagattggaaatatttggtcagcatgtgtaagcatgtcatagttatatccaaacaagtttatcttgcttctattcctgacttgcgatcgtgtagttcggcctattgtagcaacagggctgtccgctgagacccagcggctggtgtatgaaagagacggcgggcgctgttgcctcacacaaacacaattcaagtcaccggaggattctgacctgcactttgtacacatcgttccaccacgggtgttgatgcatccggatttagtcgagggggtaagtatattcattccatatcatgcggtctttgttgacactagcacacaaggctcgcctatttgagatgctttacgcttttctgtccaatgattccatgcagtcgcttcggtcgatccttcccttgaactcgtcaatggagagacttgataatctctggctgttgtcggtctccgcattcgagcttgtagaggccggcgaggtatggcttaagatccggagctgggacccgcaaaattcaccctacagaaagagtgtagatcgccatcaagccctttatacgagtgcacgctgatttaagactaagtatagcatcaacaccaacctgtacaggtacaaaactcggagtgaaatgtccattgctccatcagcaaagatgttgcttcttgatgataaaaccaccgataaaactcctatcccccacgaagctctttttgagcttcatgccctattttccaagtcactggcatggatggagacacggaggcacatgatagaacaacgggatgctcccagtaggtttggacctcgcttttcctgatcatttctaatagctttcaggtgcaaacatgtttcggttctcattgttgcctacgctgttatttcgcaccatcagacgaatatggaccaccctgccatattttattcgatatagagcgtatgaaaagctccattcggttggcttatacctctatggacaatccctttctccaagagtccaacggctgcctttcgggctgtatttacgcaagggacgaccgcaacaggcagttcaataccgggcagaggctcatactcttggcatggtggagaaattcactcaaatacctgcgccaagagcaattgatatcttggaaacccctaatgcttcatatttgctcatgacccaagtcccaggccgtccgatcggccagctgctcaatactatgacggacaagcaagtggaaaacgtggtgaccgacctaaagcggtacgtcgcccagctgcgagcgatccctaacgaagtcagcaaatttcaaatctgtaactctcaaggtggcgggatcctggactggcgcatccctgatagccagtcagaggaattgcgcttccaaacagagaccgactttcacgactatctgactagaattatgacggaagatactcgaaggcatgcggccaaatcgcatgccaccccacacgcgatcgtatttacgcatggagatctaaatcctaggaacattctcgctgagaacggcaagattaccggcatcgtcgattgggagaatgcgggcttttttccagagtactgggagtacactaagatgcattacacagttcgcagcttgactcgatggctggttgatgtcgttgatcgagtatttgagggctaccgggacgagctacatgtggagaatatgctatcagatttatcaggccccttttaagcccaaattatatcatataggctttctagataggataaagcagaacttcatttatgtttgggatgtatgtaaagttcactatgtggcagtatcatggctcctcttgctctcgccttctttgatcttatttgcatcgtctttggaatatctttcgactcggttactgaacggccctctcatgaagacaacccagtagtgatgaatcaaatatccaaaatgaattcaatccaatccgttattgtcgacctcagcattgtccgcacctccctctacctcatccttgtgcgaatagccccgttcgagtaactgggcttcgatcacagagatatcacgcggaagtacgattattccattcttgtggagctccacaagtgcatccttcacccagattcggcaggaaaatggctctccggtgtttggagagtgagagtagtcgaagggaaatgcgtctaggatacttttgcaggcttcgaatgcgctagtgctgagggaggcgagcttaaaagccaggacaaggctcatggagaagggaacgtcactggacgatcggggcgtgacgttccagccgccgcttcgattggtcgcgtgtcacacatctcccactggagtgttggtcgggatgaacaacccccagtggaagcccggggcagcgcctcgactgctgagcaagacatatagtgaatagttctcatacagacccgcaatctcggagcttggtcgaagaggcatcttggcggacgaaggcagatgtgcactagtaacgtggatagtgcggatcgtaaaaagtgtggacagaaaacttcagatgtggaaataagggaagtttcgggggggatggagaatgctgggaggagtaaggagataggaaagatccagaaatcatgtatattttatacacggaagggaggctctgcccaggagtcggcttgttgcctagctcatgccagcgcacgatatgcgtgcatgcatacggtgagtggtatgataggcaagtgagagtgatgtgatggacagtcaacatacactaagcgctaagtgcctcgattgaaaccaagggctgcccagtggcctatagagagagtatttcaaagaggggtaatgcacccccctgttaagttattgagaacacgaccaacctgcttgttggtcatgttgataccggcagtgaaatgaataccaaagggtgtatttacttcataaaatacacgtataccctcagtacaaacttgcgacaacttagcatgttagagacgcttcgaaggcaatcgtttgatatgggttgcccatacggctcttcgacttatattccagctatttgtgttagtatatagcactcataattcaagcctaggaacccaaccttggaaggttcccagtctacaaataagacatttaatgagaccggctgaaacgaggtatcaaggcgaaccgattgggaagccatggggtaattttctataggaccgggaaccctcctgcgccacatggtgatttaggattcttgattatttcacccactgtgatgtaaaatcctggggctagtaatgtgggattatttgcgggactaaaagcatagccttggggggtgtacatagggcttgcaaagtgactgggtggactacatagccaagtccttcatgttttctgataactagaaacagtatagttcggtcatcagccagtgcaagctatgtagatcttataattccgcagcgattcgttcaaactcaaatctcatctcaatattgccaaaaaccctagctacaaggaaaacaccacctccaatcaatgtgatttacacatcaatcggagccttgactagttcaagtcttacgtcgttatgtatgataaggtttccaagtacaattacgtcctaaaatggtttgtccgatttataatcaactttggttttgctttcaacactattgctttccgctaaatctctttcaagaattcaattgtcatggagacaaccttgaatcggtgggaaagacttctgtacatatctgagcatgtccatgactccttgctgcaacatcccaagccgcttggacttcacttgacacgccgtactttgatggcctcatccatgctgctgtgcctgaagttgcctcgtatctagataatactcggttgctggtgggcgggatctgtcaacatcaaggtcctcggatttcttacatttaagatcgtctagaccctaaccgatgaggcgcttaaagtcaaggagtataaagataacgagaagcaccgtcgcgggggggccgaggccggtaagaacctcaagaagcggaagcgcgagaccggtctattcgacccaggggcgtactcccattgagcagcacattcgtgaggcctaccgcaagctataggctactctacagaaggccgtggctatgctgttgcataatggtcgggttcctcaccgcattcctcttgcgttggtgagtatataaatcttctctgtatattcttatgctaacaatgccaagatttgaatcttcggaattgacgccgcttcatgaattacgcgaacggtagcaggagtttgcggacgatacccaactttgtcttgttttatttgagtttattttgtttggtttaatgcaagcgtctgaagttgacttgtagaaattcgggattgttaatgggacccctcatgcctgaattttgacagcgaaatgcacccattctgctaccgccttcccagttaactacaccgccctcctaatttgtaataccgctcgttctccctcgtttttaactggcgaatatttgacttgcagaatatggggtacagcaggtacctacaatttgtatatgaacccttaacaatatcaagtcacttttctagaggatggcgacagcgaggttctctaagtagaagatttacagtattgaatcagctaggataagcacttttctgtaagcatagaggtatatcttttactatgtaaaccagaagtaggcagaatacatggcagaaaagataaaatgtggcagaaatgtagcagaattatgagtggtactagatcaggaaggcggtattggaaattaggtaatttgggggcggaaggacgggaaataactccgccttcccctgtcccaacctcagaaagtctcatccaatcacgtcacacgaaccattcccgtttggctgcatcatcatgaccctgccatccgtcgttagtgatcacgatggttctgatttcgttctcccaccccagacagataaaggcaagaccgagacaagcatgtccttcacttccctcatgtctgctcttcccacggactgtatcatacggaacttttcacgcttcaagggcctacggcttgaagctaagcagttactaaagtctctacaagagaagggagatggaaaccagttcatcgttgtcctcaatctatcggccctaacaatcaaaaagctcgacgaagagcatcagactagtctggggggcattgagtatcgtttccaatgggaggggacgacagggctgattaaagtggttccgtcagaacgccatgatgcagtgacaaaccaactcggtcgagcaatcgacatgaagcttactgcaatgggactaaggtggtcagagatgatctggactggaacagctacatacaagcctactgtcggtgtaggtaaacaaggagatcacgcattcctaccaccaattcgctgccccaatgggcttccaagtgggtcatggccgacctttgtcatcgagacaggagtttctgaatctctccctcggctccgcgaagacgctaagagatggttcataatttcccagggtctggtgcgcattgtcattcttatctcgattaaggcgactgaagtcacgtttgaaaaatggcagctagccccccccggtgccccatccccactcactcgagcatatcttgattcactccgcgcgcagctcgtcaatatccctccacttaccaaccaaccgactcccacccagcaggcatactcagcgcaggaggtctacgtccggcgcaacaatgttgtcggggcccccttatgtcttccatttgtcgctgtttacgaccgacttccaggaccaggagaacatgatctccttctcaacgtcaatgatttcctcgaaatcactagaatcttattctgatatgttctagtttgctctcggctcactgcccatcgtccccagatgcctctattctgttatggtctgctatcgggctccctgcccatcttcccccatattcttcttcgattttccgtgtattctttgagatagctctacaaaggactgtaccactattgacctataatctatcccatttatcagggatctagtacgtacattttccttaacgatccgagctagtatcacgttgagcttctcgaggtcgaagtacaacagtctaccctagaaagattcacccacttccacagtggatttactagcgtatagatcaacatggtatttaatatggtattttactactcatactaaattactgcactttttttaaaaaataaatacagtgatctcaatttctcaactttctcaacactccatttctgactatttaacacctacctattatcatgtctgcccactcaccggaatcttcatattagatgagaattactgatcaatttagcccgaccatatttggcctcatcgttcagggtctcaaggtctttctgtattcacatctgaaattatgtccaagggcgttcaatttgtgcaagcattcatacatcacaaggacacagaccgcttcttatccgccatgatttcataaatcgcgtcgatgtaagccttggcgttggcgttgcccatggcccctggtcccattttgttcatggcataaccaatagtcatgcggcgatctagatccatgaccatcatcgatccacccaaacctcgccagaagcaaatgtttccttcggggataaaggtgataacctccggcagggcgactccaagcccaaatctgatgttgaggtacaacaccatatcgaacaccgctaatccgctcctggagcatctggtcgatagtctttagtccaagatactgcttcccatcgacagtgcctctcagtgacacacttgggtactcccaactcctgtactagatcgtacttagtcgttggctcacccaacctaatagaaaccatgcgatcctctccgtatcacactatgaaacagcatcgctagttagtgcttggccattttcattgctttgtcatccaggatgtttgcccggcggatgattaccccggatgtggccatgattaccagtacctgataagagacctcctcctgtacaaataaccacttttttatcgagagtatagttgctttcaaatatatggataatctctggcttctgcttggacaattgacgtgacgtcgctcaagtatccttgctacacacttaactatgtgggcaggctagtttcatatgcgacctacgtaattatatggacggtccgctctggattctaagagcgccaggatgaataaatacaggctgattccatatttgtgaatcatgttggttttgttgattatctctaactatcaaatacttcagaatatcgtcatacccgaaccaactatatatatcacggaaacccgcgagagaaagccatatatcaaggctgtaaaagggaacaaggaagctgggataattgtcgagaagagctacattaccagcaagcagctcccagcagccatggaaagccctggtgttgcgcgacctaacgcagcggtatctttgggaaaccttgagggtgaccttgaatgggccaggaaatgtgacggttgtatatatatgagtataatgcccttaagatccatcacccttgtgctaaattgtagaatgctctgtcctcggtggcaagaaaaacaaagagaagagacacaagactcctcccatctagtaggcgaggctggtcattgcaaggtcttccacgttggtgcttctactcggggcaagttcatcacagtcttcaaaatctccgaggatcttatcgattacctctgcctggccactcacatgtagaaagtttccaatggaagcgtggatttggagaagtctaggatctggaagttcccaacttccgttatgaactccgaaattaataatccgattttcaggtaagagacggcttgtctttataacggtatccggaaaggtcttaattcgatatcgttgaggagttccagtttcctcgaaaataagtctgaaatgaccgaattccttatgaatgtcgttatctagcatcatgatattattctccgaattgatctgttccgaggtaaagcacatattgcgaagaactgggaagtagcgccttaggttaacccaaatcgctgtatttctgtgtcggtgattggcttgaaaagatccgagtgcaaatggaataatataggccgcttcaagataggtcgttactgcgttccgtggataggcgtgagcgtgactatacagccccgttgcaagacatttattaccatctctttctaaacagcggttccagagttgcgactgagagctaagatcctcaattgaatcttcaacgccagaatgcggagacagagtgacctcagtgggtattttaccaccctgttctttcaatggaatcaataagccggttttaatgctttggactagttgccgaagcttctcatcgtttgaacactctaaaatgtccacctccagattttcttttccgccaggaggaaggatctcgaggaagtcaccgaggaagtcctttgttttgtctgtaggttcaagtagtacgtagctgttcaactttcgatccagcctctggcttggttatgagtatcaaaaagactacctagaaggcataagcggacttaccgtctgggatgatgacatcactattggcacagtggtctaatctaattaggacaggtcaatcttgttgtgctaatgctgatgatttatagtcgtcccttgagcagtgaattctcttctgagatcgcgatggctgtgacgtgccaggtcttacaaagatagaagagtgcatcaattcaaaataacttagagagagagagagaagaagcaagttgcaaagtgggaagcggcctgcttatatggttgacctttgcaaacaatgcaaacaaagcaaacttcaaactctcgcttagcactaaatttggttctgcgaggtgctgcagcacttgtcaaggcctggtatattatctaggctttgaacttttcttttcgataattatgaacgtcaacttctcctactctatacgcttagtatattggtgaatgcccgagggccgttttataccccaactctatgaaaatttgttctcgaaaggagaaagtgatggagatggaactcagtcatttcgcgagtttttccagctaatgcatggttacaggtgcgccgctgatcctttcggggtaagtcttcaatatggatggtaaatctcgactgcacatacgaaagactttgggtggtattaagcaatacattcattttgtggcatgtagaacaccaccgaaagacagcaggtgtagataggaagtcaataaatacatagaaaaaggtatacaaaatgaacatatctggtataatgccgtgcgaattaaaaatataaccaaccacagtgcaactggcttccttcatcctcgaaatatttaggctgctttagcagtaggttcatgacctttctcaagtgccacccgttcctccgacgcggaagagaaagacacagcctcaccgggagtaacccgctgcgccgcatactcctcatccggtttccagaagtccttctttccatgaacggcacggttaacccagggtggaaggaagccaccctggagcttccaggaccaaggatcggactcttccttgttaggcgggacaatgcgaccaaaggtgactttctcaagacaccaggcaatgccgttcagggtgatgtagctggtgataccggcgatcagaccgtaggcaatgctgtatgtgaacggcatgatagcgatggtgaggaaggcggggatcgcatcaccgtagtagcgccagttgatatcggcggcagactgggccatcatcgcaccgacaatcacgagcgtacaacccgtggcccaaggtggaatggaagcgaaaatcggagcgaagaatatagcgatgaagaacgcaatgccggtgacgcatgatgtcagacctgttttgccgccctcggaaataccggcgccggactcgacgaatgctgtgacggggggactgccgagaagggatccgatggagatggaaatagcgtcgaccatgtaggcaatggcgctgccctcgaagtcttgggtctcctcgttgattgcgccagcgaatcgggccatggagtacattgttcctgtggtgtccagaatatcgacatactgccgagatgttagtcttcaacctctgcgtgtatatagagcttgcgacataccaagaatgtgatgaaagccagtccaaacttgccacccttgccggccaagttccagtcctgagcgacaagaatacgtttgataggatggaaagtgacaacttgcttgaagaaatcaaacctgctggttccgagctcagtgtaggggaagtaagtgacgggcgtagtgcgaggccacgagatgatagaaaccaacaagatacccataatgacagcacccttgatgcggtacatcatgagcatgaccgtcataataccgccgcagaagatgccaacccacatagtaggactgcgcatcttagtgctgctcagacacaagcccgtatcggggtcgtaattggcggggaagtccgcacatccagccaactcaatgggagtgtcagtgccaccctgaaccattccaataccagcactgtaggtcagaccgatcaatgcgaggtagagtccgatgccgacaccggtcgcgagtttgatagactttggcagggcgcgcgccagccactggcgcataccgatcaacgtcaagcccaagaatacccatccttccacgaagacggcgagaagggcagtcgagtacgggaccatgccgctaccacggactccaacaacggtgtaagcgaagtaagcgttcagacccattccaggcgcgagcgcaataggcaggttggcgaagaaacccatgcagaaagtcgagagacaggcgatggcggcggtggcggtgatgaggtcgcgattgacttcttgcgtgcacagagcgtactcgacattagttgcgcagaaatctttcatgtcttcctcggggcagacgcaggttccaccggtcagagaggtgatattgctgttgacggagatgatgtatgccatggcgaaaaatgtggcgaggccggcgcggatttcagtgaagaagtaactacccttcctttctctaggctgaggcatggtttaatatcacattcaatattactgcgatcgccgatcacatagaatgcggtatcacttacatggccagagccctccagacgaaaccatgtccccacgggactgcgagcaactcgcacgttggttttgtgaacccagttagcgaagcccattgtgaaagagtatcacgatcgtgtgtggtggagacagcgaattccggggatgctgtcgtctttaagacgcagtatttaaagatgttcccgcagtggaggtgtgcaggatatagggtccaagggagaaatagggcaaatctcaatgtgctctcttggccaaccacaagctgctgataagaagtcagcaaaaaaaattagtttcgcctccaaatacagttatctccggggtttatgccttggtggggtcgtgtttcacccgtaacctgccgtctggccgtcctcattggctataccgttgccgacagggttttgttcaacccttcgaaggttgtctgtgaacgaagaactcgacaaccaggtgatgaaaaaaagggtccggacattatttcaagtccctgcaaatccaacgtgtccgaatcaacccttggaacatccaaaaacgatctccatgtgctttcacaaatgttgcacatgaacattcctgcaatgccaagacgcccgcaatgccaagacgccggcgcgctcagccctcgtgagctgtctatcttatcgattttctgtgtgtcgtgttacttggaaagatgcagggttctcgataacggaggaagccgatgaccttaataaggaccatccatccaatatccccagtctcttggctgtgggatatccggcggccatatccgatcgtgggccatcacggaatctcacccgcagatatcggatgcgttcggtctggcacgaataagccttcatccatctgatttacatctcggtacgggatacagattggcatttgctggcacggatgtgctctgccaggagaaacaaggggttgcgtcagactaaaccgatccgctccgccacgtgaaccacgaggcaccagaaagtcaattcttctggatatctcgtgctgatctcttggatacatgcggaggacggcgcacggcgtatagacagtgcacagcagacagattatcttcgcgtagtatccacgcgtcgtcaccgttgctatcgcacagggcacgtgctggaagtaatcatgaagtcgcctcaactaggatttattcgagcagtctcttacatagagctatcgcagcatctttgccatccattatgcgccgcctaaagaagatgcacgacgtttacaagttgaaacataccgtgccgagggctatcgtccaatgcatcatgttccaccatcggtatcaacccactgggaaatggaaccacgcaatcttttcaaccttgccaatatactatcctctgtggagtgtgacgtgattcttaatctattcacgcctcccgaatgctgccatgtctgttggctccctggacttggactgacaagtgctcctgagtatctgatggtgtttcaaagcccccgtggcctgctagacgatgccgaccttccagcattgattctcaagatttatgatttaggtggaggtactggatttatttttagacataaaactcccaaggctaagacgctcaatggccgtccaaatggccccaattcctctgatcccgtcacttggcctagagtcaaaatcgatatctggtctttggacttggtacattgtctccttactccacactttctggattactattctcaactgacgtatgccaagttattccactttgccacaaatgaaatactctttggcctgggtgtatatctaccgaattaaacggaggtttgagacctctcatgttcaacttcgttcagagtgagagtgaccatatcacagtttatttggatgaaagactgcggcctgaattttgcgtagacaatccagagaaattgtcgactttcctttggtcaatgcaaccaaacccacaggattgcaacctatggccggccttctacggagtacttcatccattcaaaggagtgacccacatgagacacttcaataattgaaggttacaatttttaaaattctatggatttcattattagcaacagggaaattttatgtatgaaaatgcaaacgtaaaggtcgcgcctaaacagactctgttttctccgaccttgatggaagaggacgctcgaagactggagcgaacttagatctcttgcgcaacgcaggtccatatttgatgaatagcaagggaatcgggatcatgatgagtgccagacacccaagaagtgtgccggcccactgcacacccaagttgatgaacatctgcttcgagaacagggggaatgcagctcccaccgccgatcgaatgatagtattcgcagcaaagacagatgcggcactatttcatagtcagtacattgttccacgaaaaaaaaaaaaaaagtaaaaaaccagcatgcttacaatgtcaaatatgagtcaatcaagtaattgaagcattgcaggaagatgacataaatgccgaatccagtcatgattccgctggctgtgggagccatccaatggattgactttgtccatccagtccagccataccagaagagcccgatacaaaagcaaatacctccaaggatggcaggaggaagtctccattccggaatgggcatgtcattgttggcagccaactttttggtatatgccctctgatcataaaggagataggccccagctagaaactcgccaataatcaatccgatgaatggaagacttccaacaccgagattcattccgtggattccttggaatacaacggggtacgcaccgagaagcgcgtacatcaggccatatacaaagctcatccagagagagatctgaggtaaggttagtttggactggcttgagagattcacgcacaacttaccagaaaaacaattggctcggtgaaaagcatgcggaatggccgactgaaattgttcgtgatcagatcgccccaatcgagctcgatctcttcttgtctcgcgcggattccccaattgtgtgtctgccgtcgcaggatgacggctttctccacaaggacagcgggtgcataggtctctttcaagaaaagaagacaaagaccagtggccagccatcccatgaaggaggagatgtacatcgtccaccgccatcccagataagacatggtgatgaagccaccagtgaatggagacgcgaatggtcccacgaacacagccatggcgaacatagcaatagcgacaccacgcgtctggttattccaaatatcggcgtacacggccggaacaatagcgatcgggctagcagagaaaaagccagcaaagaatcgcgatatcatcaaagtctggacgtccttgctggtcgctgccgcaatggagaaaatggagtacccgaacataccaacgcagatcggccatcgtctcccgatgagctcacttgccggtgcccataccgttgggcccgaagcaaatcccagaacgtatagcgtcacaccgagcacagcgacttccgtgctgatgtgaaagtgagcactgacatgtccgaccgtggaggagaagatggcactggcgaaagacgaaacgaatgttgtatatgctagggtcactgatataccgattttgcttgcgagggaccagttctgggggtgcataggatcgtctgcatcgttgaattcgacgacgtattgttccgggtctgggagtgatggaggatgaggcttcccagctccgagggggagccactggtcacgcggtgtgattcctatgccggagccaacagttgagcgttgttggagtcgataagtattgattcgctctagctcgacttcgttgggattgctttggcgatgagtgaggcctcctgagggcatgggcccagcttccgacagacggcgatcatcaatcgtcgggatggtactgaggtcatcacttccactactgatagaatcatgtgggctgtgactccgatgagacatgctgaaatgctgaaggatacaaaatgcaattggattttagagacgaattttatctaggaaatgagcataatatatatgggaatcgaccaagctaaagatttggaacatctggttcccagggatcggacggccattttcatcactttgatggtaacagacggcgtcatcgagtgtagcttccccggttgatccgtccaaagtgcgacggcagtttgcagagcggtgtactatcagtcccaacacggcaatatgctccgagccccggtcgcgaaccacggtacgatctagacatcggaagtctattcggcacttaggaacaagatccaagatggggtatcataatagccactgtataccgacgggactattagcagtagactgggagagtctgagagtcagtgaagggtcggggaaaccaccgacagcgaccctactactagtacagatcttaaagtatagcatcaccaagaagtcaacaataaaggtgcccatttgtacagagtaatatctggtcattcacatttgtgggctttgtgcgatcattgcgagtgtccgagctttgaatgtgtgtggatatatcttcgggtatgaaaggatttgagtaaactcggggccttagatagcgacaatatagaatgaagggggttgacaatcaatgcttcaggttgacataaatatggcgatgacggtttcgaaattgtcatggcagctatttcaactacatgtagtaccgatactccgtaccccggctttcgttcaagtctctgaacccttaattctaaaaaaagaatcgcagaggaaacagctatctcccaaggcagggacaatttcttccaaatacatgtgggctggaaaaagaaattataatagaaacacaacgaatacaaaacttatactccgtatagcataagaagaaactggtttatgtctgatgaaatgattttcagttccactagggttagagtggggcggagcttgcctgttcttttcaagctctcaccaagcaagcctatctacccttggaactgccctaaaaatgtgatgcatcatatacagttgagtacgaagctgcatgattgtctatcctatgacttgacggatcggcgagtatctgctgtttgtttcatgagattattggctagttaactacgcgagatattcaatgtttgcaaaggggcagctatcaataggcagcttcccactttgcaacttgcggcttctttctctccaagttattctatattgaatgcactcttctatcttcgcaagacctggcacgtcacattaaatctatttgcttgatttgttcatcaatcttgaacattacccagcaaatcaagtgcctcttctgcaataagacgactagagggtaaaaatcgcattaatccttggattatatggagtagaggtttgagtgttggatcgggtaaaccagcaaactcccgttcaagcttcgaggttccgtaatcttcgaacaaaattagcaacagttctgtatatggatcaatttacttaccatcttctagctccagattatgtctagaattcctcagcattgattcccacttagacttccattcagccaccaacttctccacgaagccaatcatctggtaaattaaaatttcgtcctcgccaagataccagaatggccaagtcgtgaagaagaaggaataaatctacaattcgcggtaagtatatttccttcaaagaaatgatatgttaacttaccatgcaacctatgcgctataagtcgacgcgataatcaaagtggtcagtgaatatcgtctcgggtaccctcaatgaagccggctaggccagcttctgttcctatccttgataagaactctcgccgaaattgaggagccgaatatcttcatcgtcctcgtctatccactcagtccattctgctgccttgatcagttgggccggcaattcattacctagaggtgtgctattaacacgttttagcggctcaatttatgaatacaactaaatgcaatattctgactactgatatctaatagtatatgagtaaaaaggccaactatagaaagctcccttacctcgatggcatataccggcactgtgaatgaatttgatagcttttggaagctgcgtagaaattcagagcacagtttccgggtcgagtttatcgtgagcctgatggtagtccgagagaaccttaccaactgaaggccaagtaattcaaaaacaagacattggtgggtcccgttagggcctatatgtataaaggcatcaagcagctgaacaatatagtttgcagaaagccctttccgacattgcctctctagaaatttcaaaatgtgtagctctcgcgatatcgacgaatttgcggtcatgattttcaaggagacccattgatttcggctggcgtgagattagctagaaatgaatacagttgctagccccatcttaccgccccatacctggatgggggcggtaataccatcatcccaccttgtcagggaggcacataagacggctacaggataaaccgactctctgtctttcgcaagccatactgtggaaaagccaccctatcctaacttgtgatgtatcttctaacgatcattttcaaatgtatctccgaggttgactggatggtatcccccaggctgatattttgacaatgactcttgtgtataaagaaggttactttggcagaacagagatagatccatcctagaacgcaaagcggatgagagcagggaggcgtttgcgatgagaagttgcgatacattcagggtaaatttcgctgccaagttggatgactaaccaccctgggtgttcttgaattctactgtacgtgctttgacgaacagagtgagatcttgtccctcatcatattgtgatattgtacaaatccagttagcccctgtctagtgtcatgctcgatacctgatttcccttgcgccaaggcccgggtaactgtactgtgtgacaagggctgaatggatcgacgagttgaggccccggttttaggggctggttatgaggctcatacccaatcaactacatttaagcgctgaaggatcagtaaatggcaatcatggccaaatggcaattttagcctcgcatgactcagacaggattccggagcccatttgcgaatcgtctaatattgctttgcgctcacgagagtctagatccttcacgcccgctttaaaaacaaacacttatttctcctgcatgaggggctgtgtactctgtaacccgtaacgcataaattaataactccccgccatatcgctgctaggagatttttgacttgagaaccccctcaaactccccgagatgaggcaatcgaaaagcgccccctacggagctttaccaggcgaggaaaattactcgagaacatcagaattccaatcttatacggcaatcgaactccctgagatcgacgaccagaaatatcgaccccaaccccaacccctcaaggtctctcagttggatagaatttctcgtctattatgggacttgactcttgccattgtcgccttgctcttcacggtgttcggtatatgggtttcttgtatcgatggaaaaccggcgggcccggactccatgggctccaaactatttgaagtctctcaatatgttagttgccccaatcctacgctcgtcctcaagatcgtcaaatctagctgacaccgcatttcctcccaaaggcacccactgtattcccagtccttttcgccgctattgccggtagcagcatcaaaagtattgcatcgtggcgcatccagaccactggaggagcgacgatcgggctagtagagcaatgtctcggcagccagaatatcacaggagccattctcacccagatcaggctgcgcgcggtaaactttgtcgccgtctttactattctactatggtgcctgtctccgctgggcagtcaagcatctctccgggtgatttcaattgtcccgagttacccaggtaatccggtcgagttgaccactttaagcacttttactccgtaccagtacggctaccaccaaatggcaacggaagccataacatcggtcgctaaccccatgactgcctccttggctgcgggtaggatacttgcgacccgcaaccaagatctctggggtaacatccgccctcctgtgattgagaatctcgagacaaacagtacgggttggatgaatgcaccccaaaacgacaacttgacgtacgcgtctcttgtcggcatgccggtgattggcttaccaggctccggcaacacatcatttaccctctcaggctcgtatctatccgtgtcctgtcctgtcttcgacacaatccacactttgaatttcaccaatttcaccgggtcaagtgctccatcccccggtaatggcgacgattgtagctggacgagcgcatggggtggataccagtttatgattgccatctcggagccatgttcgtactcactcaacgcatcaatgacaaggactcggaatgcccgtaaactggtatgggaatcatgggatcgcggttacgcaggtgctatcgatgatagatcccccataacacgagccatatgcgacattacgacgacctatgtcgattccaacgtgacatgcgagagctcaggcggaattcagtctacaaacacttgcaacctgtcctccgttcgccggtcggtggatgaatcacatttccacaaaaactggactgtcttcgatctcaatttgccaggtgatcccgagctaccgaaaagctataactacggattgttggatatcctcactaccctgtatccctatgtcgagcagaatggcggtctacagcccttgattggatattttatcgacccttataaccccgtcgtggacttcttcggcgagaatctcatgtcgcctaagaccacaaccccgaaagtctttggaacgcgtttatcacagatcttcaattccatgctctatctcggagtcagcccctcggcattcacgggctctgttaacatgacgaaaatcacacagaaaggaagccaaatcaagaatacccccgtcaaattcatggccaaaaacacccatctgcaaaatatcgtcaaatgtgaccgtccctggctcgccgttctcatagtttcttcagtggttatcttctgctttgcactggtgggcgcctatctccacctcataacgatcgctcccgatcttctaggatcgatctctgttgtcctattgcaaaataagatcgaaggaattgttggatcttcaacatggtcttcagatgaatggtccaagaatacgcgagacacaaaactatggcttggagatgttcagcctgaaactgacgttggatgtcttgcgttaaccaccgtggcacaagatgttcctgctggttcagtgaagcaaaggctgtattattgaaatgtatgctgtagctgatcaagaatggcattctcaggactcccaatctgagcttggcttggtgagacattatatgaaagacttcatgtttttatgtcttttttttatcatatataccagagcactagttaatagattatatttttcatgacacgtcactccaagctccaaagatacctaatacagctaaggctgttcctttgcatctatccattctcctagctacaatatataggcggccgaaactcatgtcctatgcttactatttacttgggcaactgtgaatgcttactaaaaaggctgaagagtacctattgaagaggagactctgaaactgggaaagtaggagcactgacagccctgtctgcaaaactggcgtgagaccagagttgtcactgggagtagtaggatgctagagaggagaaaaccatggggtaattaccaagaatagaaattgattgctgcttttatacacatgattacttggtcatcaaaatctggaatcccaactacactgcctaaataggaaggtaccgacaggtgaatgtgccttcaaactcggagatggaagtcataacaatgacaaaatcacgtggcgcgctcatggtacttcacgaagagagatctctgtgtaccaggttgctagtcagctcgtctctcatatatgcaatttcatcttgtggaaggcaggttatttgtacactagcaggagtagagagatttaagagaaggggaacctttcaagtctaatggaagaacaagcgagaagtgcggataagtgaagaaataattatagtggacgtagtcgtttcatgattgctgagcgtagtgcagaaggaattgacgagaagaaggggagagagaatgatgctttcctcttttgatggggccggatatcaatatcaacaccaagtggcaatgaagggaaaaagacccaaatacaagcttcctgctaacagaactagatcaaacacatctcgacacaagcaacaacatcagctaaaataaagcaacatatccgctcatgagacattagaaccggttgaaacctttcttgatattgtttccatccatctcacttatggggctgctgcccagttcagcacttccttcatctccaaccaactcaataatcttggacccagggggaggcctgaatgggcgcacggccgagtctgctgctttctccacaaccgcggtagtaccacttatcgatgatccagtagcatccgcctcatggggctcataaccaccatgctggttggcaaccgcggtgttctttttgttcctttttctgatgagaatgacaacgaaagcgactataatagcaaccgcagctacgacgccaaccacgatgcctgcaatagcaccaccggagagcgatgaatcagagaagccgctgtcagaattggctgtagacactgcggtggacccggtggggattgcggataccaattctgaagacacagatgaaggtgtggatatggatgcagatgcggatgtcgtagcggatgtagacgtcgataccgcgagtgtagatgtttggtgtttggcatcaatctccgtctcaggcaggacatcaaaagccgcaaatgcttcactggcattctttctccatatttcgcatgcatatcccgccctggagtcacacttgaggtcgcggtatatcgagacacataggccagatccctcgggatcccaggtaaaaagcttttctttaccaataggggaatttgtgcagttctgtgaatcttggccgcgggctatttcagtggcattggtcgcgttggtgtagcggaaggtccatccattcaccaggggaattaggaaaagtgcatataatggtatcatgacggcgacgtgggtcttttgaagagtgaatttaaggaaaggaatgaatttcgttgaggttaaatttctagctggtaaaagtccgggagggggaacatagcagtaatatatagaccctggttgctttgaatttgaaaagaataaacctcgtatttaaatgagcctcgtccgtggagttctagcccacccctgcatccagtgaaagtccccggttttggaccctgagatgactgcagcagccgatctatactaaggagggaaatagaccggtgaagactgaggagtcaatgcatattaacacggtctctagcgcatctccaggatcggaggccggaccggaagagtatggatgagtcgcgtgcgccgtagaagaaccaaactaattactttctcaggaagccataatataacagtaacaggttgaaaccgttctaacctcgagttatactaacgaccttcatacaacgggtatatagcgtgaatactacaccatgagactaaatatttatctgacacttggtggctgaccattcccgagaatacggggtacagtagtcctgtgctggtacttcctaccatgcctgtcagaatcatagtctaaatccaaatgcttttagctatttctgttcacattctgcgactagagtctcggcgggcagccatcttgtccgtggaaaatggtgattggtgccctatgtgccgaatacgaggtgaagaacatgcgaaaaattcagactgtaaactatcagtttgtctgctgtattgtagaaaaagacaaatataatgaatggtcatatctgtaaggccacacataaggagtttgtcgctatattgggtcattcacggcccggggcatcatgaatagagaaaagaaaaacgcacccagtcgccaagagtcacggaccgataatgcttggtgccaagggtctagtatgtctaagtttaagtaatttccacttacttaactccatagggcttctcctcggaaattatgatccaaatccgttctagtagcagcaaatagacgatcgatatagagcgtattattagggtcctacggtagaccatttcaaaatattctcggtgtataaaagcatacaatatagcaatgttcatgacagtattgaatcaaaattgaaatcacttacccataagtggatgagatgtttcccttcgatgaaggctccgagctaagactcaaatgcctgaggtattactcggacgttcgaatcaacagcaacatgtttgtgtaaagttttcccgcaatttccccggagatgaattaaagatcatactaacattgaaagttgtcaataaatatcccagatggtttttgctaccgcatatgacgtcaaaacacagtttcaaaggtatgatgctcacaaagtcatcgctggaaacgatacttgattaccattactctcaagcttggggacgagaatcatgcagtcgactagaaggccaagtatttgattttcttcatgtatacgtatgatagacatcgtggcccctttctccctagtccggttgtcatcaggcacccgacgagccgagagtagagtatgattgaaaggtgacgcagcggtgccggtaaggcccagggggtgtccagacttgctattttgtgagtagctattgctctgccacatgtggttatttttcagcatacttgaaaacttgcatgcgagctccttacatgcgcaagatctgtaaatagcaattggtctaagtacattgatcttgcagctcagcatgagactatagatgtagtataagcttgtacctcgacatcggagctctacggatcttcccttctggcatcttaactctgctaattgcaaaagccacggtaaagaatcgacagggatccaatcaaaccgggagcctgtcttaacttgaaggtcatttaagcacaatgaaaggtaggtaccagggcactcgcatcattgattggcaatgatccttgtccgtcgcttgccggaggttcctctaatgatcgaaaatcatcccggtgagcctgatcacttgtctcaggattctcccgacaagatcactgtcatctgctggagtaatcgtcgagctttctattgcagtctgaattccactgtggtctcacttcgtcttcagaagttttgtcattcgtgtgacagtaggtttctcccccgtgctattgatattatttggtcgtttctttcctcagctctccttggtcattccattgatgtagttctgatacaacgaggtgtgaaccgttgctgaatctgtcctctatagtcagtcatcgattgatatcgccacaaagccgcaatatctagtaagaatacatgcttcaattgtggactgttcattgaatgaggcagccgatgggtccattgtctgaccaggaactgatatgtaaaacagaaatccacttctaacttaccaccgacactatggcaccaaccaaaatagtccatcacaccaagtccgcatccctctctctccattcgattgtcgaaagaagcggccacaagggcaactgggcgaacaggaatcgcggggtagtccttgtcttctgcatcgttttcctcgttgtgatgggaatcttggcactctttgcataccgacgaatgttaagacggaaagctgaaaaggaggcctatgaaacgacgagtgattagttcatcacacactctgtgctctcgctataccaatttccattcaactcggtggtggacgacctgtgtgttctgttaaatttgagctgttgggatgggctgttcaacgctgttttgcttgtttgtgtctacgtgatggggctggtactgaatgggatgcctattggcagttcagttacgagagaatggcatggatgatgctcaaatgcgaaaaacataaactacttaagagttaagcatcaatagtaatcaataatacgttcgagttggtttcacttgcaaaaaactactatcgccctctccgtcattcctgcagttgcaatgtgcacctgcaacttgtacagaacttgacttttcccaatgacacccattctcatatgtgagaccctttacttctctagatattttccacagactatcaccattatttgtccgatcgtgtcagatccttgagatgaaattatgagttcagaagcaggcccgtctggtgttcatccaaccgatgagaagggaaagagaaaatgacccgagtcgcccgctcaagacctaacatctaagaaggtttcacttaaggtgagaggagtcgctgctgtcagagaaccacatattcaccccgagaagcaggaagaggatcatctcctggactatgtagacacatgtcccaaggggatttcatctcaatatccaaaccctgtgaatattggtggtacggtaaaatagaaactcttcccacgcggcaacagctaacatagaagagaaaagtcaccgtggccaattgaagcaattgccatgaattatcccacgttcgatgaccttggtaacttcaaaaatttcgtacgtgattcatgatgaggcagagcttgccgtgtatcttggactgcagcataaacacgacctcaggcaattcgctttttcctggccttttattaaggcatggatcagagcaccgcataatcagactatctcgctaaaattggacataaatcatctcatcaagggtggcaaagaactatcctgtatcgaagatccttaccaagtttggccgcaactccccgaggagtcagaggatgcttctttgcgaattacacacatcatggcatggcatctacttcaggtgtctaaggatattgaggagtacaccatgagcagtgatctgcataacttccaccgcacaaggagataccgcggtgaactaaacgcgatgttggagctcgatatcccgctggacaacatttttcatcctcgtccccagctaatgtcttggaggaacaagctggacgacaaattcgatcggtactggacaatcttggggtatgtttcatagatttcctatatggagtcctgggaaaaagcccttgagtttttcgcctcctcagaaaacaaggctaccatatacgacagcaggatgccgacaaagaccagaccaagacccaaccatcttaagttggctcagcagtgctcctcttctctatccttggacagatgtattgaaggcctttctccaatttaggtaaaggtaaattgggacatggaccaaaacacatatgagaacatgaatctgtgccaagtcctcgcaggtatcgctcatgagggtaaactgctccctccgatggatcaaatgatgacacaagaccctcgatgatgcaggactggtgcatcattctggggcataattcgacatatgatgtcttgtggtggctatgcattgaatttgtgtgatatgacgttgtcgtatcaagcggagatggataactgctattatcagatcgacgctttccgatcacagtggaaggtacttcaggggatataaatgaaacgaccgaactaccaccggtgtattgaatacaacctctcgatctcaacctgtgaggagtggcttttactgaggatcctttggcagaagcactcgtctttggttttgtctgtgacttccattgctattgactctctcgtttccttctttgtcgcttattccccgactcgataatttgccttgatgcaagctacgactctcaatgtatagtcggaggaccgcatagctgatcatgtttttattgctttaatatatatattcttagcccgatgggcttgggtgaatagaaatgttctcttacgcagggctttccaacaactgactcgctcatcacctagtccatattatgtacaaaaacctagaatagcatccttttacatatcaaaaaactggccgttggggctccagttctttatttttttgatattggcttgtatgttgtaaacatttaggggtgtttttatgtggagcacttgcgaaatgttcaaattatgcatgaggatgagctagatgatacaatccatacatctcccgcacttattgggataaattcggacccaatatgtacatttcatacgataatttgacggggattttgacgtaagaatacaatataggctcttatacctctcgaggtctacaaaagacatcatcgcaggtagccccacaataaataccgcggggaactttgagatttccttcccacgcgtcaatttctttctcgcacgcgttgatgctaacaatctcgatgggatctcccgaccaagtatgcgcttctttgcgcgcccagattattgtggcagaagcacaacttgctgggctcaaacgcgaccttgcaaacgccgaacaagcagcgcgatcggagaccgcaacgattgcagaaacccagcatgaggaggaccagaatggcgaagaaagacgatggccattgcttcaggaagaatataagcgatacgggcgacaaatgattgtttcgcaagttggcttgaaaggtaagatacggctacgttttggcggttggtttgagcagtaggactgatggcgatttcaattaaccacaggtcaacttaaactccgatcggccaaagttctgctcgttggagctgggggtctgggatgtccagctgcacagtatctcgctggtgctggtgttggcaccattggactcatcgatggggatacagtcgaggtgtcgaacctccatcgccaagtgctacaccgaacgaagaatgtgggaaagtacaaggtcgatagtgcgattgagtctttacgagagtgagtggatccggataggagtactgagctcggcgctgacgacttcttgtggcattcaccagactgaatcctcatcccacgtatattgcccatcgcacacatctcacacctgaggaagcacctacgatattcaaggactatgaccttattctcgattgcacagataacccggcgacgcgttatctgatctcggacactgcagtgcttcttggaaaaccattggtctctgcgtccgctctgcgcaccgagggccagctgatggtgttgaataacccgccccgaccaccgggcgacaagactggagggccatgctatcgatgtgtgttcccgaaaccgccaccggctgatagtgtggtcagttgtgcagatggaggtattctagggccggttgttgggacgatgggcgttctacaggccctagaggcgatcaaagttattactgcacccgaggttgatggaggttcaaattcgactacagcttctccacgggatcccccgtatctccatatcttttctgcctactcatcgcccctattccgcacaatccgtcttcgttctcgccgggtcaactgtgctgtgtgctctgccgagccaacggtgacactagatacaatcaggtcaggttcaatggactatgtatttttttgtggatccgcaaatttaccctcgctacttggtcccgaggaacgtatctctgcccgagaatacaatcaaagacacccgaacgtcacctccgattcgtcacagctccacaccataattgacgtccgagacgaaactcagtttggaatctgcagtttgcagaatagcatcaacattcctatctcaaacatcctttcctcaagttatcccactgcgttacagaaggctgatgatgagcaacaagctgcgcaagtaccttcttggctaccgtccgaggttgcatcatccgagtctacaaacccaatctatctcgtatgccgtcttctgcttgaaacgactcgcagattgtcgtcaagaaaatgaaagaattaggactagatcagcatgggaagagattcattggtgacatccgcggaggactccgatcatggaaagaacaagtggattcctcgtggcccgaatactaactcaaccagcccgctatattcccacgcggaatctctgtccaaaactcatatattgtcctggttttacccatcagccagcctccaggatccacccgcctcacagtcaatgatgttgtgaggattaccacaccatggctctatctatatccaccaccaatcagtgcgaacgcgaccctcatcgaggttaccgagtgtctggaaaacaccacggctgacgtcgatgtcaaactcatcacatccctcacagcgatctactagagtgacatcaatacccctgtcaccccgttggatgtggatcaacctgccacaaagtgcattgtggttggggttgccgtctacattcgcgcggtcaaagacaaacacgagagacggcacagatgtggtctcccccgttattagaccagccgcaggatccaaccccggtctcatactaggttagatcaccgtcaaatgcctgggttgagacgggactgtgtgtgttgttccgctggctaggacttggatcagagttagcatggacctcgatggatcgtgaatgttaaaacaggaagaggaatcaaaaggacgggcaagtccgggtctatttacttactcgccgagatcatgagaagtgatgctttcatgaggatcaacgggagcgccaatagcaaatcccatgaagaggaatgccatcatggcaatgtcgaaaattgggctggatatcattgtcgggccatctccttcttgctttccagcaaagacagtggttttggcagtaaatctgaaactgaagcagggaggtttcaaacagcggccgaattcgctcggtctttatatcatttctttccaggaagagttcttatgctcggacaatgtgtgtacttacgctcatctaaatgccgcggagtatcagaggcaagagcaaagaaatcgatcggagtaacttgaatgacggagtgagtggagtgttttgatggaattgttaggctgtcgccatctgtatatcggaaacagagcagcactgattttgaacattgtcatctatttcattatatccattatttggcgcaatcttcctttcaaaatctcttatagagaccgttatccagacctcaggacattttcaagcttataatgtacgaaaaatcggaagatcggaggaagcaacataaccttaaagggaggaatacactcggcgattcattcggcatagaagacactttagatagttaggacaactttaggtgtagttccgtgatgtgtggtctacctctacgttccacataagtaagtccttaagatttaccaccttcaagcagagctgttatatgtcttccctgatttaatatctacttgggtcctactttgattctacaagagaagaactttgagaaagatcgcataaatctggagcaatttcaagtttggaggttccaccatctaccattgtcagtactttgtattcacttcacggcgaaagtcgacggttttcgcgaattcacgccatatggcctgcataccttcggtctcaatcccgaaaccgtgggtagcggggggcagataccggatggcagactgatccatagggttatagccaataccatcagctagatgtttagggtgaaagcgaaagataccaaatatagcaatgttattgagtctctctgacgaagctgagagagtccacgggtagctagcctgactagccaagcatcagccaggcaccaataaggcaccaacatgccaagtttactcatgcggagtacatcctcctcccccacatatggcagccaatcacaccagggcggggtgtactgcaggatcggcatttcaaaccgactcctttgctctttcgcattattcaactagacctggaggtttctccaaatctgtcacatttcctgaactctaccattttcccccatttctcagatccatgattctaaagtcacgtgggtgatgtcaaaacaacgctcctgaagattcggatcttttgtttttgttgctgagccgaggccactgtgtgacggcggtaaacatggcgaaccctcaaactcatcagtcgggctcatcctttgggtcaatgccgtcgcagcaggatgctcaagatgatacaagcaagaggaaaacgttattcttcggtttcgtcaaaaaaacatggcagaagacgggcttggacagacccaccatcctcttgatgatgaagtgagttcaggaccaagcctgcaatatgccgcagttgaaatctctaacagccactataggggcggtattccaccaactatagccatttctatgtgagttaccaacctcagaagttcccggtctgtcagaatcagtctaacctttaatccagctaccaatccatggctgttgccgacgagtacacgactttaggctatctcgtggctatcgtctcgattctgggctttgcgatcatgccccgcgcaaagtttatccaaatgatgatctttgacctcttggctgtctctatcgcagcatgtttcgccctgttgacaatgttctccagtgtccgggcgcgccaacacaccgctactgactctactgatccatacaattcttccgcgtccgctgttagctgtttgtggctgttctttcaaatctggatggttcacaccttccgcgccaaaaacccacagctgcagttccccgtgattatttacgcgatttttgcaaatattgcttcggtatacgcgccgcaaatgaagactatgacagccgcgttcagtatggtgagccaattgctcaaagccttcattactggtctcggtatttcaacagcgacgtcgctgttgatccttcctatgacgtcacggcaggtcgtcttaaaacaaatggcgagctacattggcgggcttcgctcgggcttgcatgctcatgctctatactttcaatcattggaaagggatgacatgttcggtcgcacagagacctatgatgatgcccgtgaaaagtttggcaaaaagggaaaggtctacagtcccgaggcagaagcaatccgtggtgcagtccgacagatcacggatatccacgctaaactccacggcgatctcacatttgcgaagcgtgagatcgcattagggaaattgggaccagacgatcttcaggcgatcttccgtcaccttcgccagattatgatcccggttgtggggctgagcttcgtggtggatatctttcagcgcatgtcagactataacagatggaataagcccattgatttaaatgagcctgtagtcccggaggatgtccgacggcgggtcgtgcatgagtggaatgagatcatgagggcggtacacgatcccttcgctgtaatgatccaaactattgacgagggattactgcatacgtcgtatgttttcaggctaacaaagacccccaaacgcagagctacagcgaaatctgaagatgacaattcaacggagcaagacaaagatgtggaggccagagccgataacactgctcctggtgaaaaagcatttatcgagtattttgaaaagaaacttcgcgaatttgggagtgcaaaacgccttgctttgcagacatgggccgaggagaagggtgtcacactcccgcccgactttttcgacaaccctgcttctgctgaaatgccgaccgccgatttgctggatacatcagctacgcaaaaagagcgaagccagcggcagctgtatctatttctctacgtaagcctttgctgtttacccgcttaatatgcccgaagctaacatacagtcagatggaacaattgctgtactccaccggtcaaactgtgcttgactttgtccgttatgccgatcatattcaggcgaaagggaagttatcaaagagtcgactcatcattcctggtggtaagcgcgtgtggaagtgggccaggtcctttttgaatccggaagaccacgaagatgataatatgggtgacattcatacacaaaacaacatcctccagcttggagaggcttataaacttcgtaaagacccggagcatctgccaccgactactagttttcagaagattggggacaaaattcgtgtcattccatggtttctgcgctcgttcgagtcgacctatggcttccgtgtcgcatgtgccaccatgactattgcagtcatcgccttcctacgtgatacccaaaccttctttactgcgcaaagactagtctggggtttgatcatggtcaatctcagcatgtctcccacctcgggacagagcattttcagtttcgtgttgcggattttgggtacattccttgcaatggtagccagtcttttaatctggtatatcccaggtaaaagtatacctggaattatcgttttcctgtttatctttgtctccattgctttctacatccccatcaagatgttccgcttcagggctgtggggatgatcagcatcatcacgacaaccatgatcgttggttacgagcttcaagttcgccgagtcggggaagcggtcgcgacatccaatggacagacctattacccaatatacctcttggcaccttatcggctagctgttgtggcgggcggtatcgctgtcgcattcatttggacgttcttcccatatccaatatccgagcactcagttctccgtcaaagtctaggagcatcgttatatcttctggcgaactactactctatcattcacgagacagtctccggtcgcatgcgtggtgacgagggcgaacgtttactcaagacatctccgggtcgcaaacttgagaaagcacgacacaaagtgttcgcaaaacagatgcttatgctagccggtttacggacatactctggattccttcgatgggaagtcccggtcggtggtcggttcccaaaaaagcagtatgattcgattattctctgtgtagaaaagtatgttatgtgcccccacagcctttctacgtactaatagtccttatctttctagtatcgtgaactacctcagcttgctaggctacgcatctgataccatcatgtatctcggcgacggcgacaatcctacagataccgcctggatgactgattttcgacggctgttcaatgctgctaaagtgacgacccacgaggtcacatctttgctttgccttctttctgctagcattacaaaccgtcaacctctaccgccgtatctcaaagcaccccgtccttatggcttcgcgaaccgcttgaatgaacttaacagtgagcttctaagcctccggcacattgcggagccgggattcgcggcttttgctgttctacaaatttcgacccgttgcattgtcggtgatatggacagattactgcggtaagctttcaatagaaatttctttgttaaaccaggccgggcttgctaacagtgctattcattctaggcttgtcaagggcttagtgggcgaattagacttctctttccatgctgtaagcacaggagagtcattggctgagtcgcgagtgacttctcgggtgggatcaagggtggatttgagcgggtacgcatcatcacaacctgatgatcggcacaaaaacgattgatgtattttttttcctttttcgtctcttcactcttcatgataggcagcttttctgtacatacatatctggacgtggcatgtacataatgagatggcggacatcattatatcattctttatcaacgcagactcgtacaaatcaccgcggttgatttccccctcaacgataccccgcaatatgcttcgccgcagtcggatcaacatcaccacataccccgacttgcaacagacgctcacttttcttttttccttctcaattggggtgcctccatgtaaaaaaaaaaagcaaaatgaccgaagtcaaagtccaccaagctctcttcccccaatctgccggtaaaacagtcctaataaccggtgcagcccgcgggatcggagccgcaaccgcgatcctattcaactctcacggggccaatgtcgttctcgccgacctcccgcagctacgagacagcgccgaagaagtcattcagaaacagatggaattcccaaaccgtgcattattcgtatctaccaatatcatcaactgggcagagctaacagcatgcttcgaaacggcgattaccaccttcggaaagcttgacatcgtcatagccaacgcgggtattatggagtctgaggcggtcctggacatggacaacgtggatgcgaacggacgtcttctcgagagcctggaggcggggagggtaattgatgtcaatctaaaaggaacattgaacagtgaattaccccgccatttgcaaccttcaatcgcaagttgaaacacaattccagctagctcacatgctgacagaatgcctcctcacctaaattagctcttcgcttgggactacactatacaaaatgctccacaccacccacaacaagcccccaaccgacaaagtcaatcttgctagttgcatctacatcgagttatttcggtggtaccggtgtagccgcctacgtcgcgtcgaagcatggcgtgctgggccttctacgggcgtgtcagaatgttgcgcgcgtacacggcgtccgggttaatgctgtcgcaccatttttgacaccaacccatatcacggcgggctttgcgcgcagatgggatgaggctggacttgagaaaaataccccggatcgagttgcagatgctattgcgttcatggctttggatgacaaccgggagggggagtgtgttttggtgagagatatctattgcaaataaggaactggcatcgtgctaaatcgctttcggttcgcttaggttgccggtaagtatctccgagagctcgaggggccaagggcaaagctcttgccttcgtggttgggggtcgatcttatggattttatgggtcaggctatgcagttctttgttagtattgggggatatgtcttgcccaagaagtgctaggggtcactctctcttgcatcgcaaagcaacaaaaatatggtaacggccctgctagacttcagggtggcattatagaggactatccacatcaaggttcatgctgtgtcgatttgctttgctcatttactattgttccatgtactggcactcgaaggtaaatcggaattgcgtgatccccaactcgaagtacctactgtagcattatgccaataatctgactaagaagaccttagaggaataaaagcatgtgactcctcaccatgatctactggaaaacgaagcgagccgagccgatctcgggagaatcccgggcgatctagcggtaaccggtgattacgtactccggagataagggctccaaagctccaaggctctgttaactaaggggattttctgttttccataatttgactcgcgatggtaaccaggggactctggaactttcatgtcgatggtaaggacttcccctgaccctgaatcaaagattattaacatcgttatagggaaatggtatcgttggttccaccctccccgtggacagtcttcatcctcagacacaccgacaacactgaaaaccatccaccgaattctttcgagaaccgacaagttcgaatgaaataccgtcccatttccgtcaccgcttcatttccaactgaattatgtctatactattgatgaggatgcgggtcattttacagtcacccagtgactctatactcgagcgtccgacgtgcagcattggccatggatgatgcaaatgacgaaaccaatgtgcaagatctattgaactcattccaaatcaagcaaagtattcctgcacggctaaacgagctgcaatttcaggtctttacagacttcgtgtttacatggcggttctattttgacgacccttctacctggggaagctcgtttttcatcttcgctgcccttgctattgaattattacgtgtcgcagcatgggacgttggggttaggaatatggataccgaggagttgcccgatcacattttcctcccttccacaatggaaagcgcctgctgagaacatattttggttccacaattatctgatcgtgtgctgcaacaccgatcaaatcggcacctctatggctacaaaagcaaaagattttctatcccgcagtagcaagcacacaacgactgttcgtggtatagccattagcatacggcatatcgcactttttgagatttgcaatggcgatatatctcaatcctcccctattaccctggttaccaatacttcagcactgcgctgctcccctgagtttagggtattggcttatatcttcacctcaaatcgcccgaagggctttttggcagagtgcggagagtgttggagggttacagtacccacggagctttttgacatgatcctcaaggcatccatgccgagggatttggtctcaatggcacaagcgtcctttttggttgagaaatggtattactcttccattccccaaatcggtgccatcagcctacaaaatttccccttctctataccatgttgcggtcaatgagataagtcgggtgcatctggagtctactgctcggtctgctttacctggtcacatatggaatgtgcagagctatcttccaatggtcgttttgacactgataagtatatctgtcctgattgtcaagagaatagatcctgttctgcccttgagacgggtggtgttcaccaaacctaccgcgcaaaacgagtacggaaagcacgcagtgtagttcatggtggcaaaagtacggatttcctgttgcgagtttctaagccatcctgtcgtcggccagagttatggctaatcggaaatcttggcacgcctcctccactaaacgtcgattatacgatattctttagtggagtattttctggtctcgcgtatggatttgatcaatagcacgattcatttacatgttaagggggatagatggcagactgagtacaaaataaaagcttgatcttgcgtggaagttgacgtcgtggccgtgtgggttattagtccacgtgaggttagaatcccgtatcctcaccgtctccgagacgaagtaaccctcttctcgaacctccctcttcttatcttttagataatctcatttggtgtatttattacttttctagaatgctctgtatgcgtgccgcaccggaagcagaagcctgtcaccttcccagttctgatggcgatttcaacaaggtgttatagatgccaaccaccatgacttactgcgcccatgcaatttgtcagcagactatattccagaatggactggatttgaaccactccaagagcctgtgggtaactatctctgtgtgtttgtcctcggctagtcatatatcctttcggcgcggatgatagagctacgcggagaacaacagatgataaggttgtgtacacctagaaccatgcacaatggaatatttgtgaaggagagcacgattacttcgaccttgacatcggaagtaatgatattgccgaagttcagtggtgggctgcaatccttacatgcggacgtggctgggaggaaactcttgctcgaattagtaaacactactatccgccatgggaatgccatttgaacagcagttcatttaaattgcatcattgcgcagaaatgtcatgctcaatttctaccgagccaccgtctgcagcagaagcccaggaatatctttgcaatttcgcccgactctatgatgctttcgtcgacgggttgccattagttcagaaatattccttgccatagctgaacccaattcttatttgttcatgtcatgtatctgcttgactttgcgcgctgcttgactcactcaaacacgtgaatgacggagacaataccaacagtattttggaatcgtaaccatagcaaggtaaataatcatgcgttttaccaaccgtccacatgtaagttccacatttcaggagactcggcaagacgtctcccaaggagacgacccacatagaatcaaagtcctgactagagatttggagaaatatgatttgggtatgtaacatgtacgaaggggagtagaggagtgtccccctgatagcggcccctgcggcgagtagccttcgcgagatgagcgtggaagtagccgtggacatctattcgcgtgagacgttcaaaaaggcctcactaattgcgatcaaattattgggtgcttttcagatttctgtacctatgctttagcagaaacaaaataaagtcaaagccattacctggggtttccctgataatatagcttatccagaatttctacacggtgccatccaacgacacatttatatacggattttacgatacaacctgaatatcaaatgacaaggtaagttctgccaaattctcgttcacgaataaagactccttacgtcatccacggaatgcttctggggtcattgcacctaattatcacgacagccaacaaggggcgaggaggctggaatgcagtatggtcctggcgccctttaacccgtcattcttaagggtcaggctctaatattttccgcgatagaaggtttggataacgaaagatcacatttaggcccaatagcaatggagttactatgtatcccttcttttgtggaatccgcctaaacgtctccattgcaggtttcccgacgacgaaggggcggacagggacctcctattacacaactcttctatcccacgttgatgttggtgaccttataatgcgagctatgaaattttctgcgagaattgctgttcagtttcgattgatgccgcagtcgacctcagaaaccacaatatccaggctcctgcgacgaacgacagtttagcgacaagtacatattcttgcaagaatattttcgacggccaatatcaaatcaaatgggacgccgttcaatagccgaagaaatttacgataatgagtcgaaaatcaacttcggcgtaccggacagtgtccgaagtttggacggtatgacgcaaaacccagcactggggagctcaattcaactgttcgagagcgaaccctcagccgaagaacaacacaggcgatttcaagtgcgagaatggttggtctttatctgtatcgtgatcctggcaatgatggattcgttcaatgcgacaatcttgatcccagctttgcctgtatgtcacatgcaatacacccgtcttatttaacatctataacagagctgatcaaaccctcaattcaggacctcgcaaacaaatttgcaaagccactagcaagcacattctgggtcaacacgatatacctcattttcagcgcaagcagccaactctacttcacaatgatgagcgagatcttcaaccacgggcccatatggatcattgctgtagtcttcgcaacaatcggcacaggaatctgctgcggctcaatgagtctcgcggaactagtagttggccgcatggttcagggtattggcggcggcggcgcaatgagtctgtgtttcattgtaatgaccgatacggcgcctgaatccatgcactcgcggtattcatgttatattctgctaacgcgaatgtgtggcggcattctcggtcccgttatcggcggcttgtttgtcgattatgcagactggcggtgggcattttatttcaactttattttctgcgcgctgggtttgctggctattccgtttgctgtggaccttcgcgcattgagatatatcccgatgcgtaaattgcgcgttttggattggacgggtgctactttggcccttttaggtcttggggctctcctggttggcctttcttgcggtgggacctcctatcgctggaaagactggcagacgattgtacctcttgcggtgggtgctgtggttcttctcgtgcttctgctttatgagtccaagtgggctctgtatccgcagttcgggaagagagtgtttcggtcgaggatgatgactatgacacatctagggtgccttttgcatggttttgtggttagtagacgttttccttgcattcgtttcgtgttctctgacggcagtccaggtttttgctcacttgcaattcttcccattatacttcatttccactcattatatgtctgccactttgtcaggcatcaccttgctagccatggtggggcttgcaattgcgccggcctcggtggttggtgtcatccttgcgagagagttaagatgcacccagtggatcatctccggtggttgggtcttgacttcccttgcgagtggatgctctatccttttagatagctccacgccgaccgtagcgtggatatttttgctattcacagcaggccttgggcatggtttgttgctttcgagttacaatgttcgcatccagaatctacctaaagacaaggatgattctctgccaactctaccaacaaccatgtcatactacatgcgatcctggggtatggcagttgcggtccctattgggggagttgtgttattaaaccgcttcgccaatggatttggcagtgttgagatgaatcgcgacatagtaaactctgccaacggatatctcattctgatgaaggatgtgagcatgacaagtagacagagagaggcggttacaattgtttcggtcgctgcgtttcaagcggtatggggtctcatcacgggtgtggctatcttcgggggaatttcatctggtttcctgtggcgaaaaaactgaatgtgaatatatagtatgtgtcagaattagaagacattggatttgtcgcaacacggacatattggagtagcacaaaaagctgacctgacagagtataaggaaggatatacaatgaaagggcaaaaatcaacgtaacatttgagctctggtaagaatgactcggatttcaggctaaaggctaatttgacataagaatgaaacaccatttctcagctagcggaaggacaatcaggctggcatgggttgctccgtgatcttcacactttctcgataactttcacccagttggcttttatacttccggaatgacgaactctcgcttccctttgattttccagccagaaagcctgtctttaccaagcatctctagtgttttcttctcgaccatactgtatttggagggatcgttccggtcaaactcgaacggctgcttcaaggctactggtgggttggtgataacgcgtggatgtctcaagctgttgacagaaatcgagtgacacatgaaaggatggagaagaatcacatcgcccactttaccagtcatctggcagaaatttgtgcaattcctaacgatatccgagtaaaagggcgtatctgcggggtttccaataggctcttggccacggggatacatatacggtgtcacgccctcaggatgcttgtactagaaacttgagtcagaaatatccaaaagtggaacaggaggcttagttacataccaaatgctcagcaacatatttcatcgcctcaggggcgaccatagtgccacctgcacgatcctggatatctgtaaatagtggtgtaatgagcagggcctgttcaggcgaatcaagaaaatgcgtaaagaagtcgccatcgacatgccatcccggtagatcagcaggatggggccatgtaccctcggattcgggcaatccaagattgacgatcaaggcatcgtcccaagtggctgattccggggctacacggtcttcgccgccgagaagctcgcagatggccgcccatgccttgggagcgaaggtcctgactggctcttctttggtgcctcccatgtggataatttcggttgtccaagtcgacttatctgttggtgacataccgagtctagtccacacatcacctgcccattcggttgctttctctcgcgagaaacagtctggtagacgcacgtacccaaatctcatgaagtgatcgatctgctcttgggagagcttgtatttgggtttagctgccattgtgtctgggtcctccaaagtagagctacagcatgagcccataatttaagaacgagggacatgatttcgtgcaaaagtggcagtttggccgttacctacttgaggaaggtgcttgctgttatgtgattggctccattattctgccgatcgctcggaccggaccagtgataatccgtcccttcctgccatgactcggctgaagaaggaagcggtgaactcgggttctcctatcatttgatatttgtattcctcttcttcaatggcgtctgcttgcagatgaacaatattcattgtgccattattcgcgtaataaatggccttgccaagatacgaattccggctaaacagtcaaatctagttagtgcatgaccccgcaaataaagaatgctcccgggttgcttggcatcaccactcacaccacctcatttcattttctttcaggtggcgtccaggctaatattgttgctcaattcgacacggagcgtgtcagtcggatcctgaacgtgtttggcatacagagatccccaacacgaatcacccggaacctggaacaggaacagactaaaagataacacctgacccaacttatacctcgaatgaacacggagggatatcaattatgtgcgctgccttccccggatttatcaatttgtgggcctcggcccgtcttacctacgattgtggggccgaacggcatttgtctcgtctctaaaggacggaccatgaacacgcgctacatacccaagtacctaaataagcgaggcagttgagatcatgcgactaggctgctatagccaatccaactgtaccgaatttttaaagccgtggaattagcctgggcgtaagagatggaacgttttcgctctactagcatccccattacggcaaggtccgtctgccatacctccaatctggttaggctgtgcatggatatacgttcctaaccccagcgctacacggaacccattctagtgtcttgggaacgcttgagtttctttatttttatctttcccaatatgtgttttgatcgcgaaaactagggagagctgtcgatccaagcaactcagccaagacatcaatccccagtagccggttaatatcacagtttattatccccaatggcaaatatgaatagcttaaaaactccagcggaacccccctatctccacatttctctgccttgttctatcacaagttcggtggacatatcacctttttacccatatatttcagataccgcattcttctaggtagactctacagacatcatgggtattgctgtcggagcttcgactctgcagtccgatttggacgcgactcaagctgcaaagcctgagttagagaaggttaactggtggcaagagcctggtctccgaaagctttattgctgggctgctgtgctttgcatcgcttctgctaccactggatacgatgggtaagcatcacagctctgtggttggatatctatagagctgacggggccttctgtagaatgatgcttaacacctctcagaatttggatacatggcaagtgtacttcgacgaacccagtggcgccacgctgggattgatgaatgcaatttaccagattggtagtcttgccagtttcccttttgtgtaagtttccttgcactgaataaaatgcaagctcgctgacttgaattaggccattcatcgctgatcgatggggccgcaaaattccaattgtgatcggatgtgtcttgatgattcttggtggcttgcttggtgcattctgcacagactatggaagtaagcttggtcattttatatccgcccgtggtcaggtcgttatatttactgatcctatttagtgtacgtcgccggtcgactgctcctcgggttcggaaacagtctggcccaaatggcatctccggtgctcctcactgaaatctgccacccccaacatcgtggaaaggtcaccactatctataactgcttgtggaacttgggagcactaggtatggatccttctagtcagcctccggacactagcgtgctaattgggtctagttgtcgcatggcttgcatggggaacgatgtatattccgaatgattggtcatggcgcagtttgactctgctgcaaatcttcccggctgtcattcaaatcgtcttcatctggtgtatgcttcattttactccttatcctggatttaatccagtggctgaccattattaggggttccggaatctccccgttggctcgtatctaaagaacggtacgaggaagcattggacacactcgcatattaccatgcgaatggagataagaacaacgccactgttcaattcgaataccgcgagattaaggagactatcagcttggagatgcagttcgagaagaacagcagctatttggacttcatgaagaccaggggtaaccgttaccgtttggcacttctaatttctctgggaatcatttcccaatacagtggcaatgccttgttcagcaactacaccaatttgatctacaacagcatgggcatcaccgaacaaacgaagaagattcccgttcgtgaccccttgccctttttttaaatgactgctagcttacgttttattcatagctcaacggtggacaaaccataatcagtctaattgttagcgtttcaagcgcattcttcgttgaccgagtcggccgacgacctcttttcctgatttccacagttggtacgtagcagtacgctccacgataaatttcaaaggctgacttatcaactctctcctctcaggcatggtcctcatgttcctcgcatggactgtcgtttcctccgtcttcgaaagaacccaggatgtcaaaacaactggctacccacaagtcgtcttcgtctggctcttctctatattctattccattgcctggtcgggtctgctcgtcgcatatgcgcttgagatcttgccgtaccggctgcgcgctaagggtgttatgattatgaacctgacggtacaggcatctctggttctcggaaagtaagttgcctgaatatatgtacccgctctttggacgaaactcaccatcttagttacactaacccaattgcgtgggagaatcttcctcagcactggaacttgtcgctgatctacacggtctggatattcatcgagctctgctttgtctacttcttctacgttgagacccggggccccactctcgaggagctggccaagatctttgatggtgatgatgcccaggtggcgcatgttgatcttcaacaggtcgagaaggaaattcagattactgagaaagagtcgcaagagtatagggaacgtgcgtaattgtgtcgttgcggagatatattcgtgcggcatttcagtgccgattgtcgtcagataataatatatttgcttgctactcatgaatcaatttgaaatattcaggtatatttaggcacaacttaagttgaacatcaatatttaataattaatataggatctacaatactgccccgcaaaatcaacaaatgagagagtgtcccgggtggcatactgcctcattcgaaaatcttcccgaccaccttatccaccaagccctgctcgcgcgggatgagtgcagcctcgtattggtcgatctcctcctttatcccgccgaggctcaggtccgcggtgcccggccacacgtagcggctgcggaagacgatcttccagaagaggaatagcacaatgaagaagccgatcatggcgtagtcaaggcagaaccacatgacgtcccaaccgcccttgatgaaaacgtcgtagccgccggccagcagcatgaagagcgtgccgcccatggcgaagtaggacgtgtacggctggaagcggcccttgtagggcagggtgtcgcgggagataccctggcgcttgagagacgagaagaagtgcctgtaggttgcggccgtgcagaggtagttgataagttggcagcaggtgacgaggtcgacgaggtagttcatgacattggccgacgagctgctgacctgcaggaaggcgagcaggcagaagctgagcgagaagagcagggcccagagtgggacaccggccttggtacaccacgagaaaaagcgcggggcgtggccttcgagagacatgccgtgcagggtgcgggttgccgagaagaggaggccgtttccagcgctgaagatggacgtcatgataagcgcgttgacgagggagggcagtccgttgatcttgagccgctgcattgcgatgacgtagggcctgtgcaaaaaacattgttaggataagtgattatggggaatgaacaaacgctgttgagaagacttacgatgcagcgccagtacctgatccagtgagtgaaccaccgagaatacccatgagggtggtatcgttgtacgggatgacgatacccatacaaagggcagatcccacgaagaagagaagaatgcgccagacgaaggaccggtaggcagggggcaggatcttgcgggggttctcagtctcagcagccaccatagagatgtactctggaccgcagattctgtttttgaaaacggtcaggtcccaacgcacaaagtcatactaagaggagttgggggcgcggctgtaggtggcaacacttacgaaaagctggcttgatacacgcaggataggacgcccaggaatttgcccgtccctccggacacgatgtgttcgacaaaggcgcccgggtgattccaataccggaagccgtagcggtcatgcagggggttgccgcccagcatagtgatgaaggtgaagaagaacagccccaacatcagaatcaccttgaagatggacaggtagaactcggagatgccgaagtagcgcacggtggccacgttgaggatagcatatagaacgatcatggcgacaattatggcctcaacggggactttgtcagtccagaaggtgatcataatgttcatggctacaatttcgaagggcactaggaaggccatgttgaggaagaagttccaggccatggcgaagccgagagcgccatcaacccattcgctgccaaagcggatgaagggcgagggcacgggtaggtaagtcaccatctcggcgaagcactcgttgacggcccacatgacggcgccccagatgaagaaggcgatgaagagacctgcggggccacccttggggagagcctggcccatttgcacatagagagcttcaaggttgtcagccttccgtgctaccgttgtgaagcagaagttcttgtcgacttacaggtaccaatggctcctccaatagcgaaaagctggacttccgatcctcgcagcttgcggtgcagatgctgcgaccctgaggatatgttcgcagacatgcccggctgaacatcatcgtcgatcttggacgaaggctccgtggcgatggatggtgaaggagggcccttctcaaaatacttggaggctgacatgttgacgtggtgtattcaatggctcgtcgatgttgagctttggtcgtggaattgaatctcacagcatgccaaagggaccgtctgggctaaggaggaaacacccggctaaatgaaggatccaggtcgggcaatacgcaccggaagctggggtcgaacaatgacactcagagccgggggtggctaacatcgtggcccgctacatctctcattgtaatgtgagataagagattggtaggattacctgtgggaaatctgccctcgggagcctatttagatagcggcccctccttcgcgagctccgagtgggctgcaaatctaattgattgctcttttagaactagaatcagcactaagataactaaattgactggctttgaagactatctcgttgattataggtggcgatttgcgtagtcactctaacagctatcgagatacgcttgggccgaggggtgatcgttagcatatcggcatgtgtggcgggggaatttgtggggcaacgtgacctctgtcggacgctagtccgcccctgtggctggatggcttatcggttatcgcagcactagccatgacagggccacgagggcgtatcagtggtcggggcatccgacgcgtatcaccaccacggtactttttgcctgaccgttgcacatcggacaaaagactgtgcctctgtaaaagatgtaagggcgaggagatatctcagtacatactaccgggtagagacggagcaggtgtgcaagcaagtgcaattaggtgctaatagtatattgtgatcatattattgtgtaaggtgtatcttccaaaagcagagaagtttgagagtgagataattcaactactaatcccgaggccctcgtgatacggaaattggcctgtgcagctgttagtgccgcgctagtcccccactaagtgcccgactcagggttgcatggccatccagcaaactactcatgtatttgctatgagtgcctgtaattgttccctaattcttgttgtggcatgtgctcactgtttgaagctgctgttggatagtgcctcctcgtattggtagtgcggctggaactctacatacaacgtgtcctgtgtgccacgttagcccagggctgtcatcggtcaaaaaaggagtcagtagactacataccggagtgctggccatcttgaagttataagctgcctcatcgtcgctcacgatgtgcttcttgtgtccggcgctgtcagccagcagctgcaccttgcagctcctctccatcaagcagaagaggaacgccgcctcgtccaccgtgtagcccgtcgtcagtaggccgtggttcattaggatcgccgcctttccggtctcgcctaggctctccgcgatcttttggccctccgacgcctcgttggcaatgccgccgtagtctgagtacaccgagtgcgcgttgtagaagtagcacacgtcctggttgatcatctcaagcggccgcgcaaacgccgagtaggcccggccgtgcaccgagtgtgtgtggcagatggcatgcacgtcgggccgcgcgcgatgcacagcgctgtggatctggaacccggccgcgttgatggacccggctgtgttgccagcgacgacctcgccgtgaatgtcgacgcagatcatatcgctagccttcagcaggccaaagtgcacaccgagcgggttgatccagaagcggtcggtccactctgggtcgcgcacgctgatgtggcccgagataccctcggcgtagccctcgcgagcaaagacccggaaggctgccgccatgtgttcgagctgccactgccgcgtctcagcgtgcgtgctaaactttgggatgccggggaggcttttgcctctgtgagccatagaggccatggcgtcgacatcgccgtccattgacttggtaggcagggtggacgaggaatccacgagggctactgttgcggatggtgccattgtgattcagttgtaaaaaataaagtgttgcagagcgatgtattgcaatgtgaacggtcaaccttggaatgataacctgagtagtaagacgtcgggggcgatgtcacacaaatacatacacctaaccttgatcgcaatcacaagcgctctatctccatgataaccccatactattcctatccacactccgcagagccaaaaacaagaggatactagcggcttgcgataagccggcgttgacaagccgacacatgtagattgtcttcgtaatctcaccccgcttggggcgaagactgtatctgtgtcaacccagccattgtcggcctcgccgacagtgcagagctggcacctcaaatcttccccaccaacccgagggaaggcattagagggcatgtacaaaagaaataaacatcacaggacatcgcccagccttggagaaaagttcaacttgtgttctattatactttgccgccttctagctcactcagaggaacgcccatcatggatacgaaggtccaagaggttctcagtccactgagctatcgcttgatccagcttgtggggcatcataatacactgcctgtgctagttgctctgggcgtagtgctagtttcctatgtcatatacaatgtaagacaaaccatgggaaccgagtgtgacatgatgactgacatacaataggtcgcctttgcaaccgacatcccttatatcaaggggctgccggagatcccaggcgcggttcccgtctttggtcatttgttaaagctcggcgaggaccacgccaccgtgtgcgagaaatggtggcgccagtacaaccagcccgttttccagatcaagctgggtaacacccgggccgtggtggtcaattcctttgacgactgcaagaagatgctcctgggcaaccagaacgccgtcatcgaccggcccaagctgtacaccttccacggcgtcatcagcagtacccagggcttcaccatcggctcatccccctgggacgagtcctgcaagaagaagcgcaaggcggccggcacggcgctcggccggccagcgctgcgcaactactttcccatgttcgaccttgagagcttctgcatcgtgcgtgatatgaagggcgacagccgcaacggcgagctcgaggttgacgtgcgaccttacatccagcgttacgcgctcaacaccaccctaacgctctgctacggcatccgcatggacgaggtctacgacgagctgctgcgcgagatcctgcacgtcggctccgccatctcgctgctgcgcagcgcgtccgagaacctgcaggactacgtgcccttcctgcgctacctacctaacaacgaaaagaacgcgcgctcccaggagctgcgtgaccggcgcgacgcctacctaaacttgcttctggacaaggtccgcgacatgatcaagcgtggcgtcgacaagccctgcatctcggcggccatcctcaaggacatggagagcaagctcactggcgtcgaagtctcgtccatctgcctgtcgctcgtatcgggcggtttcgagaccatcccaggtaccctgacgtcgtgcatcggctctctgtgcacggccgagggccagatttggcaggaccgtgcgtacgaggacatcaagcgccacttcccggatatgcgcgacgcctggacagcctccttcgttgaggagaagataccttacatcaacgccatagtcaaggaagccggccggtactacaccgtcagctccatgagtctgccgaggaagacagtcaccgaggtcaactggaacggggccatcatcccgcccaagacgatgatcttgattaacgcgcaagccggcaaccacggtaagtgatcaatcacatgacctttttatgaagaaacacgacgctgacatagtactacctgcagatgtcgaccattacggccccgatgcgggacgcttcgatccagagagatggctcaagagcattgacccgccggccgaggctgaggtcaatgggctcggccacctcagcttcggaacgggctcccgggcctgctcgggacagtatatcgcatccaggcttgtgtacaccgcgctagtccggatcttgtcgtcgtacaagattgtggcgagcgagacgcacccgcccaacacggactacgtggattacaaccagttcaagacagccctggtggctatccctagggagttcaaggtccggctcatcccgagagactcgaacatgacgagcgaatgcttggatgcagccgagcagaggacgaaggagcactacaaggagtagatagacagttcagcatcgtcgttgaaatgtacgtgacacgcagttgatgtagacacaaaaatgaaataatttgaacagtatgaaaagcctcatttccagtcatgtatgatccgtgacgcctgattgattggttggcatgtaggccttttattgctggatcatgtgatccaggtgccttgttactcgatggcctcaaacactcaaaccccatactttgtctatttcatgtgttctaaatctaaaaattcctgacgttttcctctacttctccaattgtacgataattaggaaatactgtacaagtgcaacctcgtctcagagctcgcattattcaacccgtatccagccgtgacaatcatcacaaatcgagaccatgcttcaagaagcccgcgccgcatactgtacacagggcatcaatgctacatcttccgagaccccacctatctaaaacgctcaaatggagtggcagctagagtcccaacgggtcggacagtccgacacgtaggtgcgggcatgtggtcattgccccactgcagcacgccggcttgataaacacatacaatacgaatatacttaggattcgccgagtatcatcaaggtcgggttcactatacacatcatgtcttcacttagcattgagcagcttttcggtgtcaggggctacgtcgcagccgtcacaggagggagcagcggtctgggcttcatgatatgcaaagtaactacgccgaactccgcgaaatgttgcatatatcgataccttggaacactttctgacctaggtggttgtggcaggggcttgtgacaaacggcgcaaaggtctacgttatcgccttgccaacggagcccattgacgagaaggtggcggagctaaatgaaatcggccagtcgacgggtggaagcgcacacgggtatgtttacccaagccgtgtccgctatgtcgactaataacatgtgtacacgggccagattaccctgcaatgtcacggacaaggatgccattgctcgcgtcgctgcctacataagcgagcgagagagccatctggacattctcatctccaacgccggcataaggagagatcctcctgtggcctgcgacgtccttaccgcctctctatccgagctgcagacgtccatgtggtcgtcgcgccactcggactgggctgacacattctgcgtcaacacgacggcacactacttcctctcggtcgcgttgctgcctcttctagcggcggcctcgcagctcgacctaggaggcggccgcaagggcaaggatgacggccgcggcgtcatcgtcatcacgagctcctgcgctagcatgcacaacgctaccaatgtggacttgaccagctacgcgacgagcaaagcggccaccgaccacctggtcaggctgctggctgccaaattcagccgtttttacgtgcgcgtgtcgggcatcaacccaggctgtgagtgcttcgactcttattggattggaaagcagcattgtgcatccatcagacttcatgggtacggtaatggctaattcttcatccttgtagttgtccctagcaacatgaatcccgtaggggaagaagggaacatgttcagctccctgtttgacaaagtacccgccaaaagggcgggtaacgaggatgatattgctggcgcagttctctatctggtcagccgggccggcgtacgttcttcttattctctaaccacaacccttgaaccccgcactaacagctacaggcttatgtcgatggggtgtccctttgtgttgacggtggtcgtattcttcttgctaatggccaagagtaaattacatacatctacaagtactataattaagttgagctgcaacaatactatcttcctttgcagatatatatcgtctccatgcagacattcccgacttccccatattccacaacgcttctctgtccagacaacttcttgctttgctcctgtctaggagctaagaagtggatgccatataagcggtcttaatctgcggggcgcttcggtgttctgtgtcggcattgccgacgtgattgcactaataatacagcgcatccactagtctaatctaactggtagataatcgaatcgctccagtacaattatctgtgtacgtaacttgatatcgtacccaacaaaacaccccatgagtaagggcctacctacgatatatgctaactatgttcactgacaagttaaacaagtgactacttgctgcttgtgcttttgggccatatagaacctgactgcctaaaaaacggtacataagataaatcaactgctgcgattagttccaccaagcctatttgatataaaaatagccgtgccggtggtctttggagtcaagagaaatcagaaagaatagtcaaagatgtcgattgtctcattgtccgatggctcaaggtgaggaattctatttttcaagggtaggcagctgctgataagcctacgatttcagctcaagctttacagcagaggatttgaaagacgttgcagcgcagctcaactttgaattacccaatggcaaggattccgatgattatttgcgtcttctctggtccttcgaggccgtcatgaagcaggtggaagatggatccgactacattcatccggcgctcaagccccaggccctctctacgagccgcagctattggaagccgaaaccagaggacaacccgttcaatgcctggagtcaccggtgcgacctccgcgccgcaaatcccaccagtgatatcctcaaaggccgcacggtagcaatcaaggacaacatatcggtagcagcgctgcccacgacgctcggggcgcccgcatcgcttgtatctggagacgccgtgtttcccatctcgccgatcgacgcccctgttgtatctcgactgctagctgccggtgccgtgatcaagggcacgtctacgtgcgagtgcttctgcgcatcccccctatcattcacatcagccacggggccggtgcacaacccccgcctccacggctatacagcaggcggcagcagcagcgggagctgtgccctagtcgccgcccactcgctggctctggagcaggatgacggcagttgcagctcatggggcgagacggttgagctggccatcggcaccgaccaggctggctcggtgcgcaccccggccgcgttcaacggcctctacgggctcaagcccaccttcggcctggtcccttacaccggcggagggtctatgtcgcccatgatcgatcacctgggaccgatcgcatcccggctggaggatgtcgccgcgctgctcgaggtcatggcaggatacgatggcctcgatcctcggatgacgcccgagtcccctctgatggatcaggtgaaaccgtaccgtcagctcctgtcagatttccgacagcaggtcctggccaggcccagcgatgtaggtcagggctggaagatcgggcttctcacggagtcgttcctcgtcccaggtgtgtcctccgaagttcgtgacaccgttcgcgatgcgacaagaagattcttcgaggcggctggagcgaccgtcgtggagatctccgttcccttgcacagcgaaggtccggtcatctggaccgcatcgacaaggccaaccatgtccagctggctctgccagggaagaccttctggccatctcacctacctgccaccccacctaaaggctaggtggcccccctcgcaggagatgtacgaggtcctcaactcggccaatccggcactaaccaacatcatactaagcgagcgctttgcccagcgcttcctgccggcgggggacgaggcaaaggcccaccgcaaggtctttgagctgcgcgacgcgtacgatagggcgcttgaggagttggatgtgctcatcgcaccgtgcgcgccgactgttgcgatgccccaccccgagaccgtggataaggagggcaggacgccctcggttatagagaggcttgcgccggccattggtttgacgagcaatacctgcccgttcaatgtgaccggccacccttccctgactgtgccttgcggtttttccagccggcccgagcggccggatgtccgtcttcctatcggcatgcagatcattggaaagcggtggaaggatgaggaggttatcaaggcggctgctttatttgaaaggggacgggagttgatatccagctagcttcttttcacatgtttaaatgaagacttgcgaaacaattatattccagcccacatgggatgtaaactagggatgtaaactaatgggcaagtgatctatttctcttgatttgaattttgatccctagatcgactaatccacatctacgttgtcaagaactcggtgatagctcggtccaaccactccgtatcggccttgttgacaccagcccctgctaggtggccccagacagacggaatgaccttcagcgttgcagccgtgatagagccggcttccctctcgctagcctcccagcggaaatactggtcagtccggcatggcatcagcagcacgcgcgctctgattcgcgagagtgcgctctccagcgacctctcgtcatccttgctgtcgccctcactatctaccaagctgctgacgtcgccgctctgccacatgtgcagcatggcaagcaggtcgtcggggttccacccggcatagttcactcccgtcacgtcgcggtcccagtcacccagggccgcgtacccgagcgatctgtatgcctgctgttcgaaccactcggcgctcgtcagccaggcggagtaggccttgccgaaggcatggacaccccgggagatgcccgtcgccggtgatgtgacgcggtccttgtcaacgtagtcaacggcgttctgtagcgccgccttcggcccttcgaggaactggtagttgtgccggctggtccgtgccgaggagcagatgacgacggcgctctggacgaggtctgggtacatcagggtccagtggtaggcgcactggccacccatggagaagccgacaacaacgtcgagcgactgaaccttgaggtggacggtgagaagctcatgctgggcgcggacacagtcgcggtagttgatagagctcgggaaccccggggtattggaggggctcgacgattcaccgtttccgaagagcgctacgacgatgatcctgtgatctcggagcgcgccgtcggcaaagatcgaggtggactttagccggccgcggaaacaggtgatgaccagggcagttttcgacacatctgagtttaggtcgagataggccaggcgggccaaaggtagagtcgtcccatcctggaaggagaagttggggatctcatagagctgggtcgttgtgccggccatctttgtgtgccttgagtgcagtaacttcttatacagcgtctaggtctcggcgcagctgttgttcagagtgaggtgaccacttggtatatttggctagttctagacggcggcattggcagtccattgtctcagctcgcactgctgcactcacccagtgtcaggcatcaagtggaggcttcggaacttggcctgatgatcacgtgtcggacatcccgacgcatctgtaaagtcggatcggccgtcccgacatcgcgatggggcatcactgtgaggcgggatgagcgatgatagattaccccgggccgttgagggtgcccttggcccagaattcgggtatttagagtagagttgagagggacgaggtcatgtactgcaactattatacccaaacaagtcaatctttcgtttctttccgtatctctcaaacacaaacttacatcgttaatcctcggtctgacgacttacgccacaatgtctcccaacggccaagctttcctcagcaatcccgacctgcccgagggtccgacgcggttcccccaagcccgcatcgcgccaccgacctcgacgcacaagaccatctacatctcaggaacggcgtgcgtccgacccgacggcacctgggagggcgtcaccgagaacgccgacggcacgcgcaccctggacattcgcaagcagacggctgcggtgctcgccaacgtcgacgccatcatcaagggcgcctcgggcggcaagggaggcatccacaacgtcatcgacgccgtggtctacatcctggacatggagtcacagtatgcggggatgaacgaggagtggaacaaggtctttgccgatcgtgctagcgcgcctgcgcgggccaccatcggggtcagggagcttcctgatacgcggatgatcgtcgaggtcaaggcagttgccgtggttgagttctagtgtggggatttgcagcgtagcttagacaaaggcagcgggagggaatcacgtgggaaacttggagatgctcggccatgactcggcctgggtgtctggtcatcgcttatcgcggggaaactggatgtggggtgcagctgggctccgggtggatcttttatgaatgtatggtaactgagacttgctgacaaatggtaatatacacatttgtgcggtatccaccttaccgtggccacatggtcttctagatgacgtatttaaccgtgtatccatggatgtattcaatcttgatattcaacataaaactccctaaccttaaagtgacctaggtacggagtagttggttatccaatcactttggttggtcatccaatcactcgagtcaagatacggtacgtatgtactgtaagatatacggagccaaatgataagcaactccaatcttggatcgacaacctacaggctacgcgtattgcgcctacctaatgtaaccataggctatacccgttttgttcaagggtaatgtcgtcgcatcagacagctacggcggaagcaaggacgtcatgctcccggtgtcataagaggaagaagcggtgcgatagggcgttgccatcatgcaggaactgccgggtcgcccatgtgaggtgcagctttctcgacgacgactgccagagtgcatcataccctgtagcgtatgtccgcagcctggagaaaaagctgcaggacatggaaaagaagatggcccagatgtcatccccgcttacagacgggggacccttgtctttcggcggcgatgatcagcaggcttatacagagtcaagtatgggcggcaatacggtggtaatggatcacgactctggcatgcctcagcaggagtccgacactgcgaccagcatgcccggcaacctggccgacttgcttttcccagaaccgcctgcgccaccccctccaccgtgcttcgtcgacgagcttaagacgctctcacttgaagccacggcggagcggcacctcggctcaacatcgggcatctccttcgcaagactcacacaggtcgtgctccgccgactgacaccggataaggccgacttcaccttcgttagcgaccgcggcgcgaactacgccggggcgccgctattcgacttcaactccccctcagacctcttggacccctccctgtttgagggtctgaatgagtctgtctctacccacccgctactatttggtgatgttgttgttgcagacatcacggggttgtccaacgatgtcggcgtggctctggatctgccgagtgaccagtcacacatcgatcaactagtggacttctactttgctcattcccatactctatatccaatcttacacaggggtgagttcctgcagagcctacagcacctccgtgataacccgcacgatgcggcggcgtgctcgcccttgaccttattccgcatctggatggtgctcgccgttgggtccacagcgtactgttccgtttcactgtcagaagagtctgaatctagggtatattacaccaaggcacttcaatatttcgagcaagccatagcctatggcgagatggtgcgtaacccttcaaaccgaatcatctgcttggcagctgtaactcactgactgtggtctctctaggctgcgctggaggccatcatgttgcaggtctcgtactcgttcttcaaccagctaggtccaagtcagtagcatcgggccggacatcggttgaacacgtcctaacataaagctgcagatacctggtatcttgtcggcatggcggctcgactcgctgtaggcatggggttgcattcatcctcaatctatgccggaatgcccgtcgacatggagcagagacgcaagcgcatcttcttctccatctacatgatggatcggtaagtacaacataccgttctatcttacagtatccactgactagctcattagtgtcgtatcaaatgcgctgggccgaccctttgctcttcacgatgatgatatcaacatcacggtgcgacagccccttagcggagcatcctccaaaggcaacacatgctgactactaacggtaaccaaagccctttgtcagtgtagacgacgagaatatcacacccgacggtattcgcccgccgagctccctcgagccatcgctcatggccattccgcttcacatcctcgccctccgcaggatcgccggcaaaatcacccggcaggtctactccaaccgccaggccgcgtccctgaacacggagcagcgcgaggccatcctacactcgctgcacaaggagctcatcgactggcgacgcgacatgccgttcccgctgcccgacgtcaacgaccaggtgccgcacctgtgcaccagctggttcgacttcaactactactatcacctggccatgctctaccgcccctcgccgctgctgcccaccatggaccgcgagcgcgttaagacgctcgctgaggcggcgtccatgtccatccgccaagccttcaacttgcaccgccagcaccggcttgcctacaactggctcaaccttctggccctcttcaccgcaacgttgtcgcgcatctactcgactacggtgcttccggagaacctcgtcaccatcctcaaggagacgagggcgatcgaggacctggacctcgccattgccttgttcgacacgctaggcgtcaagttcccggccgcgaacaaaattagaggcatgattgctgagatttctagacggtataaggacttgcgtgattccggttgaccagtcaacgaactattcgctcctggataaaactttgtgctatatccagccccttttggcatggccttaagcgagccggaaagccagccgtgatagcatacaccacgattttacatctaccgaccgcaccacattgaggaggagaagctgaagagtttttgcaattacttatttcgtttctatctgttagttctatagcgtatatccagcatcaatgattatgtttgccccagtcatactcttcgacgtcgccagactaagaacctgggcggccacatcctaatggtggtgccaataagttaacacaccgttgaagtgacagaaaggttggggttcaaacaacttacctcgactgcgacaaacctcttcagcttggttttttccctgtgggcttccttctgctcttcgctaaaccgctctgcccattcctggtgattaaaagattagccctcattcctatcactcatggtagatagacggggaaatcctcaccgtttgaagcagcccaggcgacacgctattcacccggatcttgggcgccaccatggtggcgaggcccctgaccatgtgtagctgtgcagccttcgtagccgaataagcctgaacgacaagacgttgttagtttctcgataacttacgcaatcctcgacgtggtattccaataccaagctacccggggtcaaggaaacgtaccaacgagctccccataccctgcaggcccgtaatagaagacgtcgtgacgaacgccccctccgtctcgtcgaggtgcggtcgcgccgcctgcagcagccagaggtgcgacttgacgttcatagcgaaggcacggtcccagtccgcttcgacggcgttgtcgtccagcgacgtcgtgtcgctaaagcgagtccagccgccgttagagaagacgacgtccaggcggcccatctgcgcgtaggcctcacgcacaaggcgctcgacgtcgtcccgcgagcccaggttggcctggatcgtgacgtggccatcgccaccaagctcggcgcacagggcttcggcacgctgcgcgttcgcgttgtagttaatcacgacgcggtacccgtgttttgcgaagagacggacggtcgcggcacccaggcctgcgctaccggctgtgatgaggactacgggagtcggtgaagatgccattgcttcgacagtgcacacggggtagatggagtcgtgttgactttgaggtctctcctatggccgatgcaccgaatacttccctgcaaatgcactgctaatatctgtcgtcgtcgggcgggcgtaaacacgaaccaggacacaatgtatcctgctcagtcagccctatccatgatgtcggactgtccgacatcagcagattaggcttctccatagcctgtccaacgtacattagcgccagcgggggcctgataagcacgaaggctatcgatatcgctatcgggccccccgctacgtaccgccaaaggaagcgggggacaaatgctgattttatgggtcgtcttagtggttgtggttagaccaaaaagagcgtcagtatgcggtgcttatcagagctgttatctagtaaggtacaagtggtggactacgtatgatactcctcccaagtcatgagtttggatcagaaagcacatagaggttgaaacctttattattataatttcggctcgttacttaacgacttgccgccattaaaattacaaatagacaattccgcggggttagtgtgagtgagaagctgttccagatggcatccttgtcggtcatcgccgtcgtgttggcgccggtcctcttcctcatcaaatatctactcctcgatcccctatttctgagtcccctgagtcgcgtacccgggcccaaggcgttcgctttgacaaaatggcgtctggcatacgaggactggaagggcgcgcgcacccgtaccatccaccacctgcaccagaaatacggccccgtcgtccgcatcggcccggacgaggtctcgttcaacagcctggcggcgctgcggaccatctacgggcccggtagcaagtacggccgaacgggcttctaccgcatgtttgacgtctacggccgccagaacctattcaccttccactcggcggtggagcacggccagaggaagaagctcctatcacacgcctactccaaatccactatgctcaaggagccctctactggcatggtcgaggagaaggcgcggaagtacatggctctcatcgacgcggagcccgggcacgtgagcgagatcttcagcacactacactactactccctcgataacatcaccgagttcctgtacggcaggtacgggtccacgtctgccctggaaggctcagagccgcaccgggctctgattggcgacatcttagatccgtctcggcgcaagctttcgtggttcaccgtgcacttgaatacagtgacgaagtggctttattcgcgcaccaacacaatggagactgttgtccagccgcttctgcccatgcagaaacccgccacatacaccggcattcgagagtttgcgctgcaggcgtataggagcttccggtcggatatggaaatgtccgagaaggagggtcggccctcggaggaagccgagggctcgtctatcctcgagcgcctctgggcgtaccatcagacccacaagacagacggtctggatgacttggagattgcctcagagtgcgcagaccacttcctagccggcatcgacacgaccagcgacacgctcatgttcctgatatggtccctttctcagcctagaaacaaggcctttcaggagaagctgagacgggaagtcctcggactgtccagggagtcactcaacggccacggccttcccactgccgaggcgagcgacaagtgcatctacctgaacgccgtcatcaaggagacgctaaggctctatgcccccttgccgacttttgagccgagatcgagcgtcgccgataccgtcatcgacgggtacaatatcccggcaaatgttaccgtgggcatgtctccattcaccctccaccgcaaccccgaagttttcaaggatcctcgaactttcaaccccgatcgctggctggggccgcaggcggccgagatgaaccgctggttctgggccttttcgagtggcggcaggatgtgcatcggtttacagttcgttatttcctcctctgtttccttttgtgtagtgggtgtgcaaaacgctgattcactttccaacagcttggcaatggccgaaatgacaacgctcgcggcaacgatataccgcaagtacagcaccacgatcgcgcctggatttgaagacatcacaccggggatcactgctcgattcgaggttttttatgacgatagattccctaagatgctggtatgttcacttgatcctgacttgcacaatccggaaatgacgcgtgttcaacactgatacccctgcaggagcatacttgcctcatcaaatttgaggagcttggtggtaatgcttgaggtagcgacagcgggttaggttgtagatatgtgcccatgggccgtggccccatgccctgtagctatcatattccaagggagatatccatggacttttggttccatatcgttgatcgctaggctgtagtgagcaattggtgctatcccggagcaacctgcaggtagggagacatgaaagaaggctgtccagcgcgcttgcttgcctttcgacccgaacctttggtttctgtgaacttggtggcaccaccagataccctgactgggacagatgaagagtcgagccgaagtgaggcgggcgccgaaaaggcctcaagggattaggttagagagctgcttcaattatgtttacaaaacacggtatacgcgttgtgaaaggcggtctaaaatcaggcataattcaggcatcaaatctacaaaaccaggcattcaaccacgagccgctacggattcggcattgaagtaggtagtgaagagtacttaattctagaagacaacctcccggctcgactcatctgtcggccgtccaaggcacaggacagattctgaccactcatctgcaggactgaacggttcatcattctcccaaacctttttcttctctgttgccagccaagcctctttcattctcgtttgaactccgtaagactccaatagcgcaagtgtcggattgaggtggctgaattgcggaagtgtgccatcgtataccaaaaggtatggatctcattcatcttcctggcagccatgaggtgcttttctccagttgaacgcacacaatcagtccgaatctttaccttagtagcaagattggcccatatgtcttcaacttttattagctttctggataatagcctttagggattgggtatacttacttcaaatgaaggaacgtccttgctcggaagaattctggagatcaaggatatcgtatacccaagaaaagcaatagaaaaagttctcatcgttgaaagcgataaaagtattggcttagcttttcttcgtcttcagagtatacaattgaaatgatatcctcttctgcaggcttatcaatgacatacgcaaccctttcctatccgtaaaagcagaagttagtgtctataactattcaataatattcggacattgacttactttcatcttcttgtgagtggtggctttccagtttttggtattatcttttgcaagattcaaagcagatcacatcctcttctgaggtaaagagtgctcttaggtgatatcgagattttctggttggcatcagtcctcatgtataaagcattgacatgtttcatatctctcagtaggttttcacttaccagcaaaagagtatgtgtacattaaatccttaaatggatccttatcagctatactattcactagtgccaggaattaccccattcgaagacccaaatatgctcccatccactttggtggtttttggtggtgttctgaaagtgaagagagaaaccagtgatcatcaacagaggcagcgacaccaatgcctcgaacataattatttgtagacccacatggacagggagagttgaagagtagggttactcgggatgtgcagaggggcaagtttaaagaagaatagaatgtgaagatatatacaccttcctccagagccgttccttccttttatagccactcgactcaacttccctcaacttcctcaactccacttgacttaacttcacaacttcatcttccacttgcagacatatatactccttgttatcacccattgatagcgtctctcattccaactacttttctttaacaccgatatgcgcttccacattgccgcacttctgggtgtggcctccttggcttttgccgctccatttccgaatgtatcggctcaccctcttcctgacggactacctactccaagccccagtgagctggaggtgattgagcagaattctcacggaactctgtcaaatgcacctcctcccgttggtatcagccaaggaggaatcaccaacctcaagcttatcgcattcaacgaactgtttgaagttgccttcttcgaccaactgattaaaaacatcatcgacagggccttgggttatcgcttcgctgacgaagacgattatgactttgttttggatggcttgaaggtgattctggctgtacgagatgatatttccgtatcgctcggtgacatatactgatatgacgcagcaagaggagctccatgccctggatgccaacaatgccttggcccatgtgggtattgacccaatccagccttgccggtatactttcccggtccatgatttcgataccgccatttcgctcgccaccaccttcacagatgtggttttgggaaccctacaggacgtcgtggagaaatttgctatcggcggtgacttcgcgctaacacgtggggtttcatccattattggccaggagggagaacagcagggttggttccgcatcatgcagggcaaggtgcctagtgaactgcctttcttgacgaccagtgatctcaactttgccttcactgccattcagagcttcgtcgtgcctggaacctgccccaacattgactccattccgcttaagacttttgcacatctcaacgtcatcatacccccgactgcagataccaaaaacattaagttttccttcgataatcaaaaggggatcgaccctagcaccctttggctcacctatatcaaccagcaaaatctgccgatcgtggaatctctccgggttatctccaaagaggacgagacgattactgcagaggctttgttcccctatgacgcacatcagatgaacgggtttaccatcgctgcggttaccacagccaaggggccattcccaaatgcatacagcgtggcgaaagcgactctcgccggacctggccttttcgtcatcgactgattgaactacatcctcaatcgcctctagaagatcaatacttcatacgcacatcactatcattagccctatgacttgagcacgacttgtacatcccatcgacttgaactagttctaggcttattacacttgtcaatgaataaagttcctgacttcctcaacataaatcctagtagatcacatgaaacatattgtttagatcgttggggctcctcggaaaggccgttcaatgcgatgactcttgagcacggccgttgttattgctcaagtaggcaaatatcgctttattaatgaaactgacaagcatggctgcggagatttttggccagagttgttattacgagcaaagaaaccaacaacaaactggattgtgcaaagcatatgtatttatgtagataatcgggctccctgacctcaggatgtcccagtctggaatgatagcctggagataacctttcaaggttccaaggttacccaccgggtggctggtgaagtacccatggacgtcaaaagacaaatgtacatagcaaactcaccttaaagcttaccctggccagcattagcagtgacactggcaacaacagccgtgtaagccgtcgcagccgcaatattctttcctgagaaattggtcaagaatgcagtatcagcctgactaaaggttccggaagacccaaatccattgacctgacagacccgaccaagatacgtgctgcagacagcattggtggtggtatccggcgacgaaaacaactgtccatcaataggcgactcagcaacagccacaatattctggaacacatttccctcagcgagaacatatccgccggagccgatctcgaacgcgtgtcccgagttctggtaccagtagttgttaacctggcgtgtgttagtatgtattcatatttccaaaatagaactcccgagagagttgatcttcccaaaagagaattaaaactcaagaaaaaggcaaaattgattcaactcacagcatgcaaaagtgtatttccctgcacctttggcgcacgtccactggtgtggtagatgtagttgcccttcagggtaacgaggtcgctggatccgtcgaggtagatgccccagtagtggtatccgtcgcaggtggcggagtaatcggtcacgccgttgatgtagttgttggagatggtgacgcgcttggaggcatcagtaccgagcacgatgtgttggcgtccgatgcgggcggttgtgacgtggtcgatccagactaggtctgagttgtcgatggtgatggcatcaccgccccagacgtacttagggttgatgtcggtgatggcgatgttcctgcgtgggtgttagtttcgggatccggtttaattgcgtatagtatctgtaggtagtagtaggcagtatcttactggatgatgatgttgctcgcaccgctgacgattcgcagacccttgcccttgatgataccagccgagccggagccgatgagggatttgttggatttgacggttatgccgaggacaccggcgttgtcactgagagagccagtcagtatggttgattggaattatggggtgtggaatgcgtactagctgacagagacggagggtgcgtccggctcgtagttcgtgcaccagtcgttctggttgatggcaacctggcaagcagacgcagtaccccaaggcgcgcagccagtagaggtagtagttccctctgtgctggtgaagtcgaaggtctgggacaggacgatcacgcgcgctgaagagtcacccaggtacgagaccagctcggctgtggtgctggggtagacaggcgtggcagagccaccgccagtgacgcccttggcaaaaccctctgctgcgccggagacaccgacggccgcagctcgcactgcgagtgctgcaaggatggctgcgatcttcattgtgggacctggtaattctacctaggtctgggggattggagtaattgggtgaagagctgagggaaacatgtcggtcgcggtgggcgtagtcttatataggaacaagcgatccgtctaatgcagatggctctcccaagctgagactagcatgtttgagaatagaatctccgcacccgggtatacaccgtcagagtgaagccgatgttggcccggcacagtaccgaagccctaggtcttggtttagcatagaaacgtgggccccatgtatggccgggtattagcattggtgtccaccattttgcggagaaaagcaacgagtcgtgctatgcaggggttagatttggagaggagtccggaagaattgcagacgcgtaatataggaggtgatagatacaccaatcgggtgtgactgggataattagtatacaaggtcctccgtgaatggcaagttgcaaacattccaggaattaaagtagagtgatccggcgccacaaagtcgtaaatcaggccagcgttggacgatcggctccggtgcatgaagatgtttcacctctgggatgttccccacatttgtaacagttggagtaagcttgacagctttgtggccggactttttgctcaatgaacatgtctccgaggtccaattgagtctctcctttttgtacggactatggtatgtgttcattttctgatttatcccgcgcaatgcccaagggggtttgggggacgataattcctccgtcttggcgatttcctccgtcgatcttcaacaaacagtttgttattatcgcatcaatgagatgcgaagatcaggtccagcccatgatctgagagttacccaccagagctgtcagatgagatccactagaagttccgtgttcgaaataatttcggggatttgttggagaaacattgttagaaatatactaattggcgtgtttcatatagaaaggccatagaaaaagaaatggatgagaatctctaaatgaattctacccattaaaacagtctagtctatataacgaggtgtggtatacaacaagaaggaaaaagatgatcacacggctatacccattttgaaagatgatccactccaatctcgcctagaaagcgacggggagagggcgctgcaggtagccgcgccactcaggcagtgcacggtcgtacttggcgccgtggttcttcttcagatcctcgatagcactggcgtacttgatcaaggtggcctcggagaaagcagtgttcatgatagcaaggccaaagggcatgcccgagacatcgctgacgccaccaggaacagtaataacggggtatccagcctgggcggcaatctcaacgctctgggcgacatcgggaggcacaaggagaccgtcgagagtacggttgccgtgcttcaaagcagcatcgataccctcctcacgggtagtgcgccggcagaactccaaagcctggaagtatgtctcgttcataatgcccttgctctcaagggaagcgatgagaccgtcctggccagagccgaaggcagggtggataccgggcagaccaccctcggagccgtagttatcgatgttgtactggacgaggtcctcgacagagcggacgttagtgttctcgacctcggacaggtagtcacgcaggttgttgtagaagtcaaccttgatgtaggagtaagaggactcgttggagtagccgcgggtggtgccatagtcccagttccagccgtcgggcgagacaatctccttatagtggggcagctcggtgccgttgatgacggtggcgccagcggactcgatcagcttgaccagatcaaggagctgggcgatttggtcggcgtcgccgagggcccagaaggacttccagggaataccgaagacggcgcccttaagagcggtctggttgctcaggaactgggtgtatccaccgacgggggtgagaccctcctgagcggaggtgtagttgtcgcgggggtcaatgccgtagatggcatcgagggcgtaaacagcatcacggacggtcttgccgaaggtgccgacggtgtcctggtgggtcgattccgggatgacaccagcacgcgaggtcagaccgacggtgggcttgatgccaacaatagagttgcgctgagcagggttgatgacagagccatcggtctcggttccaagagcaataggcaccaggttagcagcgacagcaacaccagagccagtgctgctaccaccggggttaacggtgaagttgtaagcactgcggcactgaccaccacgggcactgaagccttcggagtagttgttggagcgcatatcggcccactcactcagagcagccttgccgagaagcagagcaccggccttgcgcatgccgtgaacgacatgagaatcacggggcacgacattaccgagaagagcccagctgccggcagtggtctccaaacgatccttactggcgatgttgtccttgacaatgaagggaataccgtgaagaggaccacggacagtgcctgcagcacgctcctcatcgagcttcttggcaatggtgaaagcatccgggttcacttgcaggatagcactagcaaggctgttagtcaacaattttgacgagattcaacataactaacatacttcaaataaggctgggtctggtggacacggtccatgtagcactccagcaactggacgccagtgaaagtgccattcttcagctcggcttggatctgatcgatcgtagcctcctccagcttgaaaccgtgacaggggcgcatagcgaactgtgcagcgccattaccgcccaggcgagggaagtcataaaggtagggatcgacgaggatctgggagtcgaccaaacagtcggactcttgagcaataacggagctcaccaaggcgagaccgctcaccaatgtttgaattagaggtgccatggtgataattagattgccatgtggcagaaatgccaatattttgggggagttcgtgctgttatacggagtacccccgacaacataccgtggatccctcggtgcccctgcaggtgactaagcaccaataaacccgcatttgcaaaatattctcatttccgctgttttcaatctttcgcacttcctttgggctccgttctttctatttgatctgctttgggcggcttttctattcaatcttatcttattccgtccacatctccgccaaaccatgggaagaaaatgttcaaggcgaccgagatggccgagttgaccaaaatgggccgtttaatttggagatgtatcaattaatctatatgctagcgcgaaaaactttggtacggagtagttggcggaaccgaaattacctgcctccaattgctcgtttaactggatccgaagaaacagccgactccatcgaatgctatcgtaaccgagtgcgctccatttgatcgggcgatcgggctagcagctcgggaagtctcgacccggaacatttgaactcggagggacctgaaatgtcatcattagaaactgattcctcaattcctagcctctagaagaaagactgaaaatgaaggtcggtccttaatagagagtatagaggtgaagaggtgaagaggagaagggacatagctcaatttcaatttctaagagcacccgcgatcgatcgaatcagatccacagtccggagtacggagtagaaaatgtctcttgattggttgcctcgtgccagagattctgcgactagctcggattcctcggcccatgcattgcgtggtgtagattttgattgagcatgtcgcatacgggggcctatgaagtcccagaatatccggaagacggtggaaaagcaagccgcttggagtcaaggcgtgtgctaaccgatttttcacgtgaaagacgcagatcggattagttcagcagacttagggcttgtcttgatctgttgctactcttctatactccgtactccgaactcagttgcagaatattaccccgacggctgattctattattcaccagaaagtttaatgtgaagaatgcaaccctgaaacccgggagcttctccataagcttcgattacgcctttgaacccgcggttccggaggtttatatggctggtacagagttcccgttggccactggcatcctgttccctttgaattattgaatgttaagacccgcttcgagaaaattatgagaattatgccattattatcttcccgaggtcatacaacgtcccagaccttgccctgtgatgtcgttatgtgcaaggtctccttcatctatattcttctatctctaccaattctgatcatgtcactttgaaacctggaatgactgtccccgtcgatatccttgctgcagatgcagcagggagaatccctagcggggtctcgctccaatatctagcagagtctcgcgataggtccgccattgtgggaatcattttcatggtatgcttcacgggcttgttgatgattgtacgtctatatgcccgggtgttcattgtgaagaagactggtctggacgatgcattggccatcctgacattggtaagatcatccacttttcaccccagatctgcacagttagtgcatcgccctcgagccgtgcgcgatagaatggcctatgaatagttacaaaaacataatccactaacaatggcccccatagatgctctacattgcctttgtcatcctctccatcgtcctgatcaacttgggaagcggtcgtcatatcgaatacatccaatatgtgctatcacttcccacggtccgcgaaactgaagtcctcgacttcgtcgcccacattctctacacaacggctctattcctatgccgtctctccggtctagccttctacttccggctgacagcccgctcatcaaaactcaacctgagcatcatcatcgccgcgccgctccttctcgccgcatacctaccacaactcttcctcctgatcttccactgcaagccggtaacaggactctggccctacgagtggcaggaggagccaaagacctacaagtgtctctcatggggactcgtctactccgtgaactcagggctatcgctcgcatgtgacatgctgatgttcgtgatcccggccgtactcatcaagggactgcacgtctctttagaaaaaaagatcaagctatcatttgtgatgttccccggtattttgtgagttcccaccccaaaattcttattcaccaagccccacaaaactaacaatacacagcgttatcgtgatctccgcaatccgcgtttggctcgtagccgcaggtcaatgggactccgacggcagctgggcctacagtccgatgctgtgcgtcgagagcgccgagattgctggaaccctagtcgcgctctcggtgccagcggtgaagcccgtcttcggaaacctattcgcacacatggccgagtatacgtccagccacacgcgctcgcgctcgcggtccacaaaactgcacagcctcggccattctaaaactattcccagtgccgcgatctccaccaatcgggatagcaagcgtctcattaactggtctaaaattgggatggacgattatgagatgatgccttctgaggtctcggtttcgagggatatcttaggtggatcgagggggagtgatcgcagtgaagaggcgaggcataagatgcacggttcgcggagtcccgggattcgggtcacgaatgaggttaatattactcgcgcgcaggagagtgaggttagggttgaaacccccaggtctagggggagttagtggtttcttttcttttgttccaatctgtaaatagatatatactagacgacttatatcatgtaaaaagtatttcttcgggtagcctacgcgccctacatacatggcattgactgcgcattttctttctttatcagccaatagtctatgaacaacctggtcatccagttttttgtcgccgtggcttgagagtatcaagcatgaaacgaatgaccgaagcattatagccaaagccccggtttcccttggttgaaaacagccctcgatatgttcgtgtttgagaataaaactcgtgatgtctcgccgctgtctaacggcgaagcgctatatttgggacgttttaataacggaaatgtgatagacatcatttgcaacagcagtatctagagccacgcataaataaagccttctgtctcgacaggaatctcgacaggaatatcaccatcttcaacctcatctatcatcatctatcctcatctgagcccagctcaagttatcaaatctacaacctcaatatctaccttgttgccgataccatgtcttcaagagctggtcttgccagccgtcaagctgctggttctcaaatcagacaagcacctccactcaaccctccacgctcgtatctcagagtccccctcgatacacccatcactccactcgtgtcctgccatggaaacagccatatcaactttccaaaaaccatcaaagattactaccagctcgattcgatgacactcgacagtctgatggtgtttttcagtcaaatccgtcccgaaaccgcagatactagacggtatcccacgattgtcgctccatggctcacgtgggattacgagcgggaagggtggcagacagacgttatcgatatcgaaagcaagcgctgcaggttcggcgagttcatcggtttaaccgatgagcttgtggatcccaaactcctcaacctgcgaagattgcatgcggagcgtgacaagcccgtgcaaaccccctctggtgaaacgccctccggtgcgggtgctgtgcaaaggccaatgatgagacgggagaaacgaaaggggcttttcaggcggcttccttttggtaaatagtggcgttggtaatttctttttttgggagtcgtttgtcgttggaggcgttaaatagtgtggcgcttattttgttttagtgagacatgaaatgatttgactttctggcctgagttggattattattcggcgcttatactgttggtgttattgtggagatcactctactcctcctgcgtgaataaatagttgcgtaagaaggagagattagcttcatacaatatcaagactcggtcgttcgagtatcatcattgattaaaattcctggagcaggctcaaatacaatgttgtcatttgccaaaatgaaggagccaatctctttagggtgttgttcgagctgttgaataatcaatcctggtgattaccaacctgatcaataatagagatgattctagtgcgaagatatttacgatcaacgtattgtcatgatgaaaatttgatgtataaaagtgtaagaacacttgtttttctagagaatgaaatatcttgaatttgacctgtcccagtgaaccttggccaaacacgttcataactcttacgatccagaatgaccctcaaatacctcattacaggagcgactggaggcctcggtgccggagtcctgtcctaccttgttgcgaatgtcccaccgtcagagtatgctgcagcgtcctcgaaagaggaaaatcgcaaacaattcgaagaccgagggatcgcattccgaatagcaagttacgacgaccctcagacattagagaccgcattcgaagacgtagagaacctcttcttcgtcagtaccaacaccttcgacatcgagaagcggcggaagcaacaccaaaacttcgtggaagcagcgaagaagatgaacgtgaaacatgcaagtcatcaatctccccacgcaaccatcccagctaacatcaaagccacaggtatggtatacatctctcgcattcggcggatacaattccgactccaaggcagctgttcaacaaggccatctgatgacagaggaaatgatgaaacagtaagctaagccccgaccgtgacaatgcagtcactaaccccagccagggccggtatcaacttcacctctatccgtgagggtctgtacacagacgccttcccgatcttcatgggctggtatccgagcacatcgaccgtctacctgccctccgacggatcgattgcctttacactgcggtcggagttaggcgaagctaacgcgcgactgatgatccggggtggacacgatcgagaaatcgtgctgcttactgcgcagcagactatcacattctctgagattgtggatctgatcaacgagacgaccggccgaaatgttcagatcgagcttgtctccccggaggagtttgtgcagttgaagacagctaccgacgagggcgggaagtcggaagggttcttccaggcactgttgtcatggtacgagggtatttcaaagggggaaacgggtacgattgatccgctcatggcggatgtgctggcacgtcaaccagtgccgccgcttgaggctcttcgggctttcttgacggagaatcgggactatgagtggcatcaaaactacgttaatcgcagttagttgttgactgtaatagttggatatatagtatgacaattgtcgcggtttccaatggctaataagttcaaccccaccgggcaacgggccaacgggatgacctcatgacctctgcccagtggatggctgagtcatcactcgagctcccctacatagttacgtcatcccataccaagtgggtccctagttacatagtctccagttgatcaagcacgggctttagatactccccagaagcgctggagtgttcggcaaattcggctgtctatagattagcgattgactatccgaagcatgaactgaattattaccatcctcagtcccatctaggacaatctcatacatctttccacttaggagaatggttgcagggcttgtattagaatcagactgacggggaaattgggccgggacatggagacgaggataactcgatggcgctagaatggaacacattactagttaatatatggccaacttctatagatagaagagtctcactaaggccaaagtgttttgtgtcatggaaaaatgtcagtttacaccggtctctcgttgatgctgttgagctagcatcacgaaaagcttctccgacggatggggaaatgagcacataggcttggccagggttccctataaccacgggaaccttctcggagaccggtctgcctgttgcatcaagggcgatgaattcagtggcgatatggtggaaatggcgagttggagaatctctggccagggcccgcgaaagggggcgaacagcattgcggaacatgaatacagccatcagtagagaagatctagagaaccaatcaatgtggagatgataatctgatgctatctgggctactccatagaggataagtcaagggaagaaaaacagctcaccgccctattcaatagccggcctctttccttgataacaacagtagggtggttagccttttcgctatgtagtcttttaatgggctttcttaatgtctttcttgtaaatctcttctctcctttcttaagctttctagattgagggtatcaaacggtagaaaaaggcttaaagtgggaaaatgacttcttatagttacatataagcttccgtatagttagtatacagtacctacatatttttcagtggctcaggacatacaccgatcctaacaacccatactagccggtggtgaccagctagctacgtactttatactcccttcactccgtatgtgcatatgttgtagtatcgcttctgctaatgatccattgagtcggccggaggagccgttctcccgtctcggcaaccaggaagtagcattgaagcctgaggcatccattttttgtggatttcgacctgggcgcaatcactgatcaatggaggattggagtggttaaatgggatgattgatgtattttctgaatgagatttcattgtcatttccaattgaccaagattgaatccatatatagccatatcactgtgcagtgttcgcagtagccaaattcctggacctccaagtcgacgccgtgtccgcccgaggcttgtaaacacctctgttctgattggctgatatccgctgatgtcagcatctagacacccgtcaaacccgaggttactagcgagacaccttcgacctcatttccttgaagatctctgttggtttgtgacactcgacttcgtcgtcgctagcttagacacttctgaaacctctcctctcttcctcatctctgtgctatcaatcccaatctcctcaccctcttcatcctctctttcctattcacatcggtgtttttttcacatttccgattacccgtcatggcctccctccgtaccacttcgcgattgttcgcggcgtcgcggccgatgttccgccctgccttcgctcgcacctatgcgaccgtcgagcctactcccaccgtgcaacccaagatcaagaccttcaaggtctaccgctggaacccggaccaccccagcgagaagccccagatgcagtcctacgagctcgatctgaacaagaccggacccatgatgcttgacgcgctcatccggataaagaacgagctcgaccctaccctcactttccgcagatcttgccgtgagggtatctgcggttcttgcgccatgaacatcgacggtgtcaacactctcgcctgcttgtgtatgtatctggatccgcacgcccgagatgtcatagcatccgacagcttccgactgaatgctaatcctttgtctgtataggccgcattcctaccgataccaagaccgagtcgcgcatctaccctttgcctcacacctacgtcgtcaaggatctggtccctgatttgacccacttctacaagcaatacaagtccatcaagccatatctccagcgcgatactcacaccgcagatgtgagttattttatatgccagcatcacctccaaaaactaacaattttgccagggtctcgaaaaccgccaatcccccgaggatcgcagaaagcttgacggtctctacgaatgcattctgtgcgcttgctgctcaacctcctgcccgtcgtactggtggaacagcgaggagtaccttggacccgccattctgctccagtccttccgttggttgatcgattcccgtgacgagagaaccgccgagcgcaaggccgctctcgacaacagcatgagcgtctaccgttgccacaccattctcaactgcacacggacttgccccaagggcctgaacccaggtcgcgcaattgccgagatcaagaagatgttggccgtctagagttgtggatataaaacggagtaccgcggaattttcttttctgtccaatgcctttcctctgtctctctatttcctgttttcttttccctttttccccgactatttcacggatgtttctataggtgtaaattgtgaactttgtttcttacaggaatgcactagtagtccattcggttgtatgatgatagcgcatcctatacatttgtattgtaccaatcaatcaatcaatcaatcaatcaatcaggtgtctggaatttccgtatgagtccactatatctgcaatcaatattgatcaacaccgcggtattccttcatgacatgctaagcgaatcccagaacacttatccctctaggcttactcggctatatattctcccacgctaacaccactagcacgctaaaaaggcccggcattgcatccacaaatcataatgcggacacgagcgatactcaactgggctgttagcacagttggtagtgcgcccgcttcgcataattgcgagcgtgcgggaggtcctggtttcgattaccagatagtccattgtcttgtacatctttttggctcgaattttcctgcatttttcttacctttttgctttgtcctcttcccggctgcagctaaaagcgggctataaaatccaacacttcaagcgggattcccattgggccgctcggatggcgggcttacgcgggaagtgcccagttatcagccaatgcaccgcacgtcacatcctttcgaaccagcggcgctccattgtttccggcgctgatggacaaggaggattgtgcccgagtcgaagctagcgtttgatgcgcctgcacctgcacagtgggtgaaatgagattattcgacgaatggcagctctatatagtaccttagcgacctgccgggccgtgataatatccacaatatggttgtgttttctaaataagcatgttgaatcaggaaagagatgaattgtacactaactatgcactgtctactccgtatgcaccaccgatctcgtgcgtcgcgcctctcttttaatctaaacccatgtcctcacccctcctatataatacatggccctcgctcctcttcctcgctatcagtgagccggttcgactataatggattccttgatactatacgtggcattgccgctgggactactggccttgcgcactgtgtaccatctgtacttccatccgctatctaagtttcccggtccaaaactcgcggctgcaacctttctctacgagttctactacgatgtgatcaaaagcggcatgtacatctgggagattgagcgcatgcacgagaaatatggtgagtatacagatccgtcaatatcaaccataaaagccagaggacaacccctcatacctcatccaggcccaatcgtgcgcatcaacccacgagaaatacacatcaaagactcaacctactacgacgaaatccacgccggcgcctcgcacaaacgctctaaagaccccaaatacgccgtagcctttggcgcgccctactctctcgtgggaacaataacccacgaccaccaccgcttccgccgcggcctgctgagcagctatttctccaagcgctcggtggtgaaccttggcccgtccatccacgacaaagtggacaaactaatcgcgcgcttcgagcaagcccaccaagccggcgacgtgctgcacctacaactagactttgctgcgctgaccgcagatgtcattaccgactactgctacggctggagctacggctacctagatggtgagaaggggtcgcggagtaacgacctcgtcgacgcggtcaatgggctgatggttatgttccatatcaaccggttcttcccgttccttatttccattttcaggaatgcgccgcctaccctggtgcgctggctgcagccgcacatggcggatttgtttgatttgaagaataggcttcgacagcaggcggatgatactctgcagaaacagagtgtacggaaggtcgatactgaggggaggtcgactatatttgatgcgttgactagtttggatttgccagagaatgagaggacgcttgatcggctggaagatgagtctgcgctgctgcttggtgctggtacggagactacggctagggctatcactgtcgcgatgtttcatctcatcgacaagcaggatatcatggcgaagctgcgggcggagctgaagactgtgttggcgacaccgctatccaaggcttcgtgggcggagttggagaaattgccatacttggtgagttattgtttctgatccctttgttacttccgttgtggattgctgatttcgtcattccctggactagacgggtgtcgtcaatgaaggtctgcgtctcagccacggcatgacagcccggttggcacgtgtttcaccgactgaacccatgctctatcaggattgggttatccctgcaggagtaagtaaatgatactggctactggcttactggctctaatcttccggttcgattattgggagtgacacatgacggcaaacctaaagccgacttttttgggggatgctgctgatactatgcattgcagactcctgtcagtcagtcgaactacttcgtccatatggatcccacgctcttccctgagccggagaaatttgacccagagcgttggatccgcgctacggcgaatggcgagtatctgagtaggtatatcgtctcatttaccaaggggagcagacagtgtctgggaatgaagtgagttgtgcatatgtatctgcctgattttatactaagattttatctagtcttgcctatgcggagatctacttatctttggcacatatcgctcgtcgcattgacttcgcactgtctgaaactactgctgataatatctgtgtgtatcgtgatatgggaattgggtgtccggaggttgggttgtttggtgttagggctacggttgagggacttgtagaggaataaggttgtgttactgtgggctgtgcaagtttcctctgtgatcatggtcatgataatataggagagtgaagcttgtacttttgtcgatattaagggtcttctgcggtgctatttgacttgcgtgttggttatgcaggtaaccgcgttgtggggtatgtttcacttggtgaggtactgcatgactgaatgatgacggatatttcattatgatggttttggatgtattcaattacgcgatgtaacggatgcacttgcgacgatatttattgcatatgtaaagtcaacctcttttttaaaattgactctagatggtctatcattgtaaatccgccaaacatcaactgaactgagtagtagacaatatattttaaccagcctctgtccatattaagatcatcaaagtagggctagtatcgggatcatactcatgatggaacgtaacagacttcaacactctatgaaatatgatatctaaaaacacagatcagatctgacgctatcctgcgaatgtgtgacaacaacgcagaaattaaaaagtacatccaatcaattccaatgcaaagtaagttcgggatatcatgtactggttggctggtggtgcaaggggggttgctaggggatacctcctgcgtgccagaatatcccctacacattcatcaccctttgaaccaagttttgacgggggttgatcaccttttgtgtatggggtacggagtagacgtctccctgaattatacctggcacagtactagtatacaacataatctgttcttcctaggggtcatccgggaccatccgcctaagatagctaagatagaaaatgagcaacaatctactttagaaacctatcaccctcattgtattgctttaacctacgtattcttcgctcgcatctatgagggaactgaagggagctttatgtgtacaatgtcacattacctccgtcatccacccgttgggtttgcacgctttgactacgtaaaatgttgatcgttagattaatctccagcctccgacaagctatcctctttcctgggcaggtccccgaggcgatcattccacaggagcatacacggcacatggaaccctttgcaaccctccgataggcatagctccctgctatgtagtcgtcatctcagcgatgttgatcactattaatgagagcgcgaggcatggaagatacaaaacaacagtttatccaaagccttacatcgcctacataaacgctagtacaaccctgtctacaactatcagccagtctttcatttgcttctctgaccatctatactctcatttattcccgaagacccacccaggccacttaaccaaaaatgcacgtctcatacatctccctggcgttcttcgccgtcggcgccatcgccgcgcccgccgctcccaagcccagcaatgacttcggagacatcactggcggcttccctttcaacccaaccggctcctccagcattgaagacagtgatgagggattcggcaactccttcccctccgccctcgacgcaatgcaccaggctttggccgagaagcagcagtccgctgaggccgctcagcatgcatcgacctcccatactgcggtacccaagtccacccacgcagtacagaacttcccggctcctgtcgtctcccaggcctcaagtctctctcaggccacccctgtcgcctcgcaagctcctgtgatttccaaggctgcctctaccaccgccatccctactccatcccacggcgtcatccctactcccaagggcagctctgcttctccttcctctagcgcaactccctcccctagcccaactgcccccgctggccctcttagcggccttgtcaatggaattcccattgttggaggtctcgttcacggtcccctggctggcctcggtctccgtcgttgagattagtgttaatgtgatgtgactattgccttatgcactcttctttctttctttctttgtacttcagtacctctgtcaatggcttggtgcttttccttttccttttctttctttttttttcttggcaatcattcatatatccagtgactttaatttataaaatctgttttggctcttcatacattcttagatcgatgatattatgacatgaaataagacaacatctttaactcgacgggtatctccccgcagaccccaaacgatcaatgcatccctcaacagccttctgcatagcattggtcgcctcctccaacagcgtcgtcaaaggcaccttcccagccatctctgcctgcaccctcacatactcattattcaataccttattgatattgatcttgctaactccgcaatctatacacttcttaaagatctcctcggtaaacggatccgccccgtgaagcacgagcctaacctcccgaccaacagcctcattaatagacttcaaccgctcatactccaactgaataccgcggggcccatactctccatgaacattcccgaacgcaggcgcaagccaatcaatcccggtgttcacaaactcccgactctcctccggtgtcgtaagcaaaccctccagatcagccgtatcagcaaccccatcctcaccaccctcaatccgaccaggctccgcctccgtcgcgatcccccgcgcatggcagtactccaccagctcgtgcgtcaaagaaagattctccgccttctcgtagtgtgacatgtcaaccatgatgctgtcgaacccacccaggtccgccgcataccggattatctcgggtgtttgcgcgtgatccatgtgcacggttatgggcaccgtggctttgcgcgcggcttcggctgctgcgtgcacaagtagtccgtcggcatagtggatggcccacgggaagaggaggatcatggctgcggagcgcttggcttcggcggcgcggacggtcgcaaggatgccttcaacgttgtagcagcacattgcggggatgccgtaatggtttgcggaggcatggtctaggatgcgcagggcgcgattttcttggagagtcatttttggtttgggatgggtgggggtgaaggtgagggcaaatgaggggtttgtagttgaggtttactgtagaccgagagtcagtagtgttatatagtctcgttgtgttgtccgacttggtcgcttcacgtccgaactgtcggagttgctccgtgagtgacgtcactctgagctgttcgccattttgtgttatctacacttcctacacccattgacacgcaaaatatgggaaattataccggaggaaatcagactttcagtacatattgcccatattgtcggcaattgtatgatatacagtacttccactgcctgagcaagactaacaacttcgacagcagaattcaggcacggggaaagtagatcagatcaatgtcttattaggtttgttttagatgttaagcataaataacattctatcaaatcaaatccgagagctaccttggttagctcttcaaatataaaaatgaagttttgcctgtggtggccaacttccgaacctctcccaagtacaacttcaacaagcacaagaaccaccagactcgcatctactaaccggaaatcaatcaacatacaaattccaaaatcggaccctggcaatccatcaaatttcggcgaaagccaaggtaaacctctcggacttgcgccgaaccatcccgcgctccaaacatcttcccctcataaacccccacgcaggtcgagccattttaatatattatatacattaacatttctccgggactattctatcaattgtatacatcattccctcatctaaacaaccatgtccaaaccctcaatcggcttcgttggcctaggcgccatgggcttcggaatggccacacatctcgtgaaagagggctacgcagtacacggcttcgacgtgttcccggcctcggtagaacgcttcaagacggcaggcggaatcccagcgtcttccctccaggactcagcaaagggaaaggacttctatgtttgcatggtagcctcagcgccgcaagtgcagagcgtccttttcggtgatgacggcatagtcgcaggtaaaccaccaacccaaccccaaactaaacaatatatatttgaaaataaaaactaacccactcaataatcaacccagttcttcctcaaaattcaacccttctcctctgttccactgtcccagcatcatacgcccaatccgtcgccgcagagctcgcctccatcggcaggagcgatatagctttcatcgatgcacccgtctctggtggtgcgctccgcgctgctgcaggtacgctgtcgattatggctggtgcacccgacgccgcgctggagaaaggccgcttcctgctgcaggagatgtccgacgcgaataagctgtatcttgtccccggcgggatcggcgcaggtagtaatatgaagatggtgcaccaggtgctggcgggtattcatatcctgggtgctagtgaggctcagggatttgcggcgcgactggggttagatgctgtgaagacggcggaggcgattaagtctagtccggcttggacctggatgcatgagaatcggttgcagcggatgctggatgaagattggcatcctggtgctagtgctttgactattattctcaaggatgtggtaaggaatcttgatgtttttggggctttggggataagttggctaattgagtttcgatcaggggattatcacgacatctgcgcgccaaaatcaattcccgactccactttgctctactgccgagcaggtttatttgtctgctttgctacagggatatgggcctgttgatgactcgtctatggtgcggcagtacttcgctgagccgataacgaaggtcacctctaccaagtctgatgaggagacggcggaggcgctgcagctggtgctggatctgatggaggtgactaacctcgttgcggctgctgaggctatttcatttgcgcgctatctcaatgtcgatttgaagcagttttatactcttgtcggtgatgctgctggtgctagccggcaatttatgacgaaggggttggagattattgaggggcctggacaaggtggggatggtgtctctgagactattgatgccgctagttctcgtctagagaaggctgtgcagaaggcgcgcgatctgcactgtcctttgaatctcggcaatgctgctttgactgtgttgttcatggctaagaggtctgggttaggggctgagggaagtgccagtgtggtgaagacttatgagcagtagtgtaattgccgagaatgagtgatgaggtatgaaaattattagtccaaattctacatttgtgctgagtccgcacgcccgatggcctatgctttcacaggaacatgaaccatccaccgaagaagctcatagatgatctgagtcaccgtaattaccgtcgtctctgccttattgtcgtacataggggcaaactctacaacatccacgccaataataggcaggccagcttgcgatagaccatataaaatacggagaagctcccgtctcgtccaacccccaggttcaatggttccggtcgcaggtgtgaaggcttttctcggtcagtataagttgcttaggataatcaagattgagtgtatagtatttaccggggtcgagcacatcgatgtcaatgctgatataaacatagttatcgccgactgtattcacaattctccgaataatgtcgttaattctaatcttatcgatcattcgggcacggatagtagtaaagctataacgatgacacggtgaatgggaggccagaaacggccgcttttgacgccgttttaggccgctcgctcaccgtgggcggtcttggcgtcacgtgggacaaaggcgacggccctgctgtttaatgccacccgggcgttctgttggatgttcctggtgcctgacccatcgatccagccctcggggcggaatgtatgttgtacctaccgagcgcgcaattttaatttttttttgctgatttgatacattacgataatagtcaatgtctgcgtctacctagacatacgcacagcctaagaaaaggcacatgcagcagagcttagatcacaattcttgaacaatgggttattggggaatgagcccggtgtgaatggactgggagcctggggaacaggctggtagtatagtgactctgtttgaatcatccccataaggatgttgcttacaccagaaagctgatactgataaagtgtgcagtgctccgacgccgtgctatatagccacgcgagcttactctgaatcagaataccacggcctgcaaagacgtcgatttgatcttgggtagtcacatccatatcgtgatctgcgacccaaacctagatgttttctagataggcatttgacgaaggtgtgagatgaaggagaagggatgccgcgatgtaatagaatggctatttctaccacttgccgcaccccaaattaggtaggcacctaggataaggcagatcctaatcactattggttgaagaaaccaacgcaatgatatgaaggtaactggtcgtaacggaggttgatacctgagtatagttgaaatacctgctattgattcgcgcttcttattaatttacatatctttggccactcagcatatgtttcatatattctcactcagcctaaagcaccaagacaaaggtctctgatagctcatcggtttgaaaagtcctcgcagcttgtgaccagggagtttctcccggtgatcaagtaggaaagcaagatctacccttccgtgatacattgcaccacttggacatactatctctttttcaatattttgcccttgccgctgagcttttcctcgtcccctagaacgacctgtacatatctagatctcacgcagcaatgatccatctaggagaaagtaagtctgagaagtcatgctcgttcagtgctgcccaagagcccccaccagccttggacggcagcaatatcaatgtcgagagcgagcaacgccaaacccagaatggacgggctagccccgaacaggccggaccgctaagccggatcccgagggcggccgaatccggccgggctggcacaaatgccgattctatctgaagtactatcaattaactactatttacagctagttataactttcctagtctctccgggtttttaaaagaatgtcttgataatattatcactaataaatacattgtgtgggtatccaaaatattatgtccagtcataagaccaattagtatgtacagcccaagagaccccaacaagcgcaggggtacctgaggccaaagaagatatatataaaaaaagaaagagagacatcagggatatcaaaagtcccaacccaaataatccaacgacttaaactcatttcgcatgcgacacacagtaaacatctaaacctcaattccgagcttgacagccgagatcgaatcagccgagatcctgcggtccttaataaacttaggccaggtgttcgtaagcacaaggtacttaatactggcctctgcatcatcaaagatcgaagcgttaaagtccgcagggatctcaccccagtactgcacgcggtctttgatcggtccgtccatctcagcttgcatagtcttcccagagtccacagaagccggcgacggcagatcgaaagtgaatttatcaaaggggctggtgggatcacagtcgcgctcctcgccgtacacaaggcgcgtcggtttctcgaaaacgtcttctagtttccgcagctcctggtgcgagatgttgacgggaaactcggcatggcggacgctgataaactccgcatagagatgcagcgcacggttgaagtgttggcggacgatatcgcgcttgctcttttcttggagcgcgctgccgtccttgatgcattggggtaggtggttgcgccattccgcaacgctagtcaggaagacgatattctcgccggagaattcgcgcagagcggagaactcttgtagtggagctggattgcgctcgaggacgtgctcgagtgcgcccattgtcaggatgctgtcgcgggagttgaatgtgctcgtcgagctgttcgatttccagcctgacatcatcgatgctaccattgtcatgtcggagtggagggacttttcttcggagctggcggatttgactttcaattcccagcgcgcgatcgagtcgagggtttcttgtcggagggatcggtggcgcattacttcccagcaggggaggaatactgtgaatatttcgatgaacatgatggatagacagatcctatagtatacctgcgttagaggagtaggtctttgtggttatgtgtggaacttaccactgaggaggaacgaagaccgcgttgaccggggccatggcgggggcgtagaggccgacgagccacatcggggtagcgtggaggttggaaacagcgcagccaatggtctggactctccagccgtgggtatcgtggatgttgcgagactgccagaggacgatgggggcaacgatccaagaccagaagaattgcgagaccacaccgggccaccattcccatcctgtgccctgtgctgcgagtacctctgccggggtaccatggactccggtgccaggaataccccatgagctatggtatttgcgggagatcacccacatgaggacagtgaggaacacctgcgtgagatggcgagttagataagatttctcatgcatatggaaaagcaaggtaatcatacctgagcaaacattgcgatggcgacgtaaataaggatcttggttgtatatccgagagcacggaagcggttgatcaacccatccttgtgttccaaggcaggcgattcagtagaacggtgtccatccagagcatattttctctggagctttgcgacatgttgaaatctggtattagagccgtggaagagcgccatgccacagggcaacagagtccccatgagccaataggcgccgtcacctggcataatagcgccgatcatagtggcgaactgggttggcagccagtataaatgaagaataacgatagaggttaaggatagagcgagacctcgaatgcgaagcgtcggcatatcacgattggcgatcagataggccataccgaccacgagggcggatgtccatacacatgcccaaacagcccaccagatggtgacggggccgagatcaatctgaggcttagactcagccgtggcaccgtattcggatcccatgttgaaaagtgctgaaggaatgtgagtgaagttgggtagcgcttggtcttttccagagtgccgggtcatgatcttcttatgtagaacatgcgtggaactagggccacggggtaaacttgcacgagcaagtggacccctaatcaggttggatgtcgatcataatggctgaattatccatcccactccatatttctgctaggaaacattatgttgtggagtccctcaatcgattgaggtatatcactgctcagttatggtcttgagtttggtcccgcgtggtggatggagaatatccacagttgctatttgtcaatcgatctgaggatatgattggttgaatatgaaatttcgagatcaaagatctcttggcagcacgaagctctccccttttctattgaatcagcctttgacgctattgattttccaagaattgtgttccgtgaaggaagtcgatcgtagccctaaaaaggcagaacttcacattttggtatgacgtttgaaatgttcacttattacagtgataggtgtaattatttccagactccctgctaccgctaatgcgcgcaaaattctaggctgtttcatacccatgtcaaattagagacaattctctactattggaggaatagaccaggatcacatggaatgtaagataatgactttgtcgacttggattaatatgtagaagtatccaaatttagcctagcatataagacacggaagagactcaaatttcaatagtagaataaaccgaaatgaaaaggttcaagctattctctgccacgacatacagaagaaatcgtaattaaaggaatgaaaaaggaatgaaatccataaatcgcacatcacttaatacgtgaaggctcaaaaagtcccatggctttggcctcctcctcagatcccgcctgcaaattcccagaatacttgatctcaaatccaggaacaagcagggcatccttcagacccctatccacaacctcctcctcagaacgcgcatacatatagccgtaatacgtgtattgccccgcctcagagatcgacacgctaacctcggccttcgcacaacaatcccgatcatgttcaggatccttcaatcccatctgaaaagcatctaactcacagtcagcctcgacataaccatagaacatccctccatagtaattaccacattcaccaggaaccggcgccgcatcacagaggcccatatgcccaacctccttcagggagatcgcactcataaacccagtgtacctatgacgcacgcgctccggcatcgtaaagtgtgcgtccttgcaacacccccatggatggcggatatccgaaagtcccatcgcgcgggcgtggtgcaaatcatccgcccgcagcaacccgtagaacttgccgtcctcgccggggatccgacggatatcctccagccagcgcttttctgcctccacctccgatggtgcatgcattactccatagtagaggtgaaagtcggctcgtcgctccgcacagcatcctcgcacatgaatcgggtcaagtaggccctggcggttcgcgtcgtcttcagaatccgccatcataaacccttcccactcacctgagtaatcgccgtacggccggatttcgcgcagccctcgttggtaggcagattcttcgcttgcaaacatgctgcccatgtacatgtgcttctgaggccgggggtctgggcctggtggggcctgttggctcttgggggatgtacaattgcgtggggaaatggcgatgctggtgtcatcggggggtgcggggatggaattcttcgcctcccacatttggacaagggactctgtgtcccagatatgggggtcttcttcgatacccagctcggcgttcttctcgcgccggtcgtcccggtccttctttagaagtgcggtgtctaggagcttggacatggccttctcccgggcttttttttcatcattttcttcaatgcacttcagaacggtcgcttcaatacgctgctgcacaaggtcaatgtcaagagcggactcttcggacgagtcatagtcaacctcagggctatcaactgagtccgcgggaggcctgtcccccagagcaggatgaggatggtctacatcagcaagataaatacgcacatccacaccggagtcgtcagcttcgggctgttggtggtcagtgtccacctcccgccgccgctgtcgcttctcgaaatattcgtcaattctcagcttaagtatattgtaccttatcaaagaagatccgcaaagcgacgatccagaactatccgtgtcgcagctgcttacattgctgggagtagcacatccagtgccctcagtatccggcgattcagtctcaacactttcctttgaatagtcactctcacatccgctatgggcaagatgagccggactggtcttgatggttatagatgcaaaagagtcaggatctgcagctatctcggacgaaccggaattagtacgagccaatttaaaggccgtgctagacgacctctcagaacgggccaggcttccgtaattcgactctgattcgctgacaacagcacgcgagcagagctgaccatcgtcgctgtggtcagtactacttgtttccctgtcatcgggagtgggatcactcaccatgcgcgcgctaacttcgatcacatggcctgtagcatccaggccttcaatcgtccggtaagatttggcggtttgcgtctggtcgtcttcttgagagacgttatcagcccactcgctctcgcactgcacgcacatgctgggctgggtggagaggaggaggtcgtgggagggtttgatctggttgcaggatacgctgctctctggaccggccaggcggatcttgttggtgtattcctggcagctggtcatgctccagttagagatatgtccgcagctgggatagtggtggtaggtgtgtttacacattctaaggaaaataatagatgagtagaaagcagagagaatatatgagatgagacaataagagagaagtaatttgccatattagataaatattcgcgaggatcgtggtttatatatactttgatctgtgagttgaggtagtctccgacaggcgagtacaaagccgagtcgttgaacaaaggcaagttatataacaaagacagagttaatggcattgttttggtcccatgatgaaactctctgttcaaattgtttgtgaaaaattgtgtataatgcattcccaaagatctttagcctattagacgcgcgtgtcaaagggacttgtgggaaacgcccaatcctcattgtatccaacccagatgacacgtaaagcaaacattgttgatttcatgttagcatggtttcctataggtctagtagcccagtctaaataaaggcagaaacaaatggcgtagagagaaagagctgctaatatcggacatgttttcctttttgccttccccccgctcttgaattctccctcacacatttgtcttccttcgtttttcatatatgagctgcaaagcttcgtcgtagaagggcttctccagtttacacaagaccagtatctgcttggagaagagctgacaaattcctgattgtccaatgcaaaagaactggattggaaacgcgaatgtcgatctgggaccaaggtgtctgacagctcaatcggtatctttcatcggacccggtatacactattcaccacataacagatcctgggcaggcactggaaagcataagagaagtttccaaaatatcatttcatgtacaaaagtcgcatttccgtaataacagtattcccatgaatatattgcctccaggacatccagtcagccctccaaatccgccaaatatctaactccagagtccatcagccaccaagaagcagtctcgtgcatccatctcaaaacaggcctctccaacggcatcctcctaccctcatccgctctcctccacataacagtctcactacaaaacacaaccttcccttcctcctccagactactactttcctcataactaatcgccaaccttccttccacaaaatccaccgtctccatcttaatctcaaactcaacccggtccctcctccgtaccacaacacgataaaccccacaaaccaaatccccaacctcaaaatccagcgcggcaagatatcccgtcttaaaactctgcttctgttccggcttcttgctagccatagcaagcatgagcgcctgcgggaaccgcgagaaagcggtcatattgcggcgcacgagtcttttaaagagcaggtctgtggcctcactgctagggaggcaggcccgcgggactgactctgaggcgtggtcgtagattgtgaagtactcatcactaaagacggtttccgggattgattctatacttggttttgtggatgcggtgagggttccaaggtgggacttgtgcgctatgcgttttgataggcgttcgtggaagatgtagaagtagattgccgacgagctggttattatcgcggttgccgtaaggatgaggcggatcattttggtttttcttgaggctgtgagatgtctacaactggggttttgttgcgaaaaaagtgatgcgatcatcggatacgaggtcggcttggcgcgtcatctgtccctacgtcttatcaccagatcgtccagttcaatgatttccatatgaaatcgtcatgttaaatcgtaaatcggtcaggtctgtgatcacatcgaaaagaaactaagttgaaaacgcgcaacgccaacccaacccagccccaaccaaacacagtggtatactttgagaagatgaaaaaaaaaacacagcgaagtaaacaaaccctcacttccttgcctcattcttcaaaacatttacacggccactattatgccatttcgcaagcttaacaccacacttaccacaagaatgctcgacatccttaagcgaggacatcaagtaagggatacagccgagacagcaacaaaagcaaagaatagcagcccagccactataccaaaatgaaaagaagatcaactaccaatccaatatttcaactatacacggaaatccaacttactgcgtagtcccaccgctcacagactcaacactggtcatctcccgttctccacaaacaggacagtcaaccggacaaggtgcagactggacacagtgcagcggtatggccgtagcatacccactaggatggctggaaggcatgtagaactgctgtgggtagcccggcccctgctgtagctgtgcttgtatgtgcgggtactggggcaggggctggcctgcgtatgccttgtcgagcggagcagtcgttgatggcgacgcatcgtatgcgggtgattggctggtggagtcaggtcgataggggtagtgttgttctgaggggccgtttattgttgttggggcgtagctggagcgtagggcgtctgagagggactgcccagtgtgtgaatatgtgtctgagtgtgggcttacagggcctcggttttgatggtctgagaaaacgacttctggatcttcgcaatatacgggggctggtgctggaggttgttaattatttcgtgctatatgagaatatgatggggggctcatagcgtactaggcgtcgactcggggtgttctgtgtatcctggcattgttgtagagtctgggggtctggagacagacagtttgatggggatacaagaaatttcacttgtttgaatggttttaagtgaaatctaacagcgcttgcgaatgtaacaagataaatgataaaaaatagagcggtcgatatgatcgtcaagggctaatatgtaagatgtaagtattacagtggatacctggggattccatgagtgcactgccttgaacagggttataagatatcaagcctaagccacgcaagtgaagcttgcagtatcacatagccagaagactaagagaaagccgtcgggttggtctgtcgatctcgcttttgactcatccgtgcatgaacagggattatctacagaaaaggctgttgatagataggtatgcggcttattttgcgaccaatctatatttggatcggtctacatgaaggggctagagataattcaattcatcataagccggttgatgctagcatatcgcagctcaattctattccgtacatattataccaagccccaacaataattcaaataaaaatccagcccatttacactggcggttataacattattacaccccgacgatcgtaaacgcaaacctgatcacacgggttgtggccgatcaatgcctgtctgagcctttgaaggctgagtaggcctatacgcaaatgctccttagtttctcgatctttggcccccaactactatttggaatacactatattaattgcgcataggcgtattgtaatataaagtgagatatatacatagataaggctacatgaaacaagatatagatgtacaatcactccaaaacatggcctactaaagacctaaagccgaaccgaaaaagatataaatcgatttacgctaggtgccagatgttatacgcagactcatagacccccaagccattagaaatattgatatcgaaccggtccccctcccccaggataatacccatactgcgcaaaaacccccagaatctcactcctctgcattatccccgcgtaagccacaaccgtctccgtccgacgaatcccgcctttaacatacggatccgccccgcgctccatcaaaagcctaaccatctccaggacattcgactgaacagccttatacaatggcgtctgccaaggataccgcataagatcgaccgccgcaccacgatcaagcaacaacctcgcaaccctcatattcccattcaacgccgccagcgccaacgccgtatcccccgtactattaacagcattaatatcagccccgcagtccagcaacatctccacaatccgatcctgtccatacgcggcagcctgcgagagcgccgtctcgcccgtccccttacccgcattgatattcgcgcctgaggcaatcagcatccgcaagatgcggtcgaagccgcgcgctgcggcgacgccgagtgctgtttcgcctttcagagcccgtacgttcatgtctgcgccgtattctagtagaaggcgggttgtggcttcgtggccgaaggaaacggcggccattagggctgttgtgccatcggtgttttgggcgttggcatcggcgcctttggagaggagggtttgcacggtttggtgttggttggcttttatggcgactatgaagggttctcttgagctggtcatttcccatagaatgcggctcattcggcggggcttttttgagtgtgtggaaactctgaaggcgtggaggtctagtgagggttttggctgggtaggttctgtcactggtattggggggttcatgtcgttatcttgattgttctctgtaagaaccgggatggggaagtcttcgactggtaacgcttctttctgtgtatctgtgcaatcttgcatgtccaacgtcactggtattgggaagttttcttctcgtattgtctctttttcaggatatggctgctcctggattgaatatgagctgcgcttgtctgaaaatgagaaaccttttggcgggagcgggagaaatgggaggccagttggctcgtctgctagccaatccttgtcgtctaggcttctctgacgttctaattccagagtttttgatagtgccgtagattcaaggacttcctctaccggagccgtgttttctctgtgaacaggcagaaggccatatgtctctgctgtcttttgaaaagtcgagataacgaagtcccggttcagagtcaacaaatccgaagcaataccagtagcgaccaactcttcctgtaactgaggccagattctgtcttcctcaagcttcgaggaatccttcaaaatatcagaaatagccaaggcctcctttgtgccagcacgaatgtcatcgataaagcacctcagtgcgcgctcaattatcttctgggatgatctgtatcaatgttaaaatccacactgacccacacacgaacataacaaacacacatcatcatattcagattcacctcggtaagcccgaaaataaccgaagagagccgcgcgcgaatgtcagaaaccagactctgagccccgagcgcatctggatgtagaagcagcttctgcaattctagcaggacaacatggcagctgtacaatctttttttcaaaactgcgagatggacgcattccgcccctagagaggaagtatacgcctcggtcgcgcttagtacggtcagaagcaggccgagctcattttgggcctggttcgttagggccattgacacgcgcgttgactcatacagggagtcagctaatagtcggattgcggtagtttggtgccatggttgactgcctgcttgtagagacatggtgctgggctttgagatagtcaatgggactaggccttgcggagtgctgggtgcgataccaggggccatctggagagggcccgtgcagcatcgccccatttttggcctccttcttggggttcgattctatttttggagattatttcaaggtagacgatgtgatatgttattattaaatgaaatgagaagtaaagagagttagactcaatttaagaatgatcagggaatagagtagactagatcaaatccatgtgtgtagcctgcgagggattacaacctcgacattcatctcataaagatcctctaaattaggatactctttggttgatagacattggagatcgagaattcgaaacacacaactacatctacttaatgttactagtctacaatgaaagataagtcaaacagataaacatggtctattcaataacaacaaagcaagcagggaaaccaaaagaatttcacgggcgagaatggctttgaaggcaaacacagggacccatatccagaggcagcggctcactagagagcaagatggtactgggacgaatatcatccaaatccgaagctacaataaagtcaacgctcgcctgtggctctgcggacatctcgtcagcttcaaggtcagcaatggctttcgtcaagggtgccatgatgcggtcacaacacaagcgctcgaactcagccgagaagtggtttgcaggtctattacggacggtgcgacaacgcggacatgcccgtgccatctcttcacccaggacaaagatggcctcgagcagccgcgccaatttgtagagcactggaatgacttcggggcggaggccgtctccaagtccaaggaaccggaactcttcgaatagagtggacttgaagcaggcgcatgcggtgaggaatcgcttttcgtagttcatcctgtcggcctcttctgtgcctaggtatctatttgagctcacgttgactatctgcggcgaagaatagactggggcttgcttagatgtaggtatgctcacctcgagtcttgcgtgattgtagatgataggagggatagcttggacagatgggaaaatcctatttatgctttttcagttgacgttgactggtttcagacaaagactttgatgattgtacttgacaaagggatagaagccatgtactttataaatcctttgtggaattttgagacaagtagtcaaaggcgggcgcattatctttggcgcaccaaattcactcagttcaaattcaatacccagcccttattgggaccaagacccctatgcatgtagagtagattgtagcgccttcataacactagtttacctagaaggtatatccctcttcccataccgtagctatgccctacatgccatcacattgagttaactagataaatctagaagtggcgacatgttttgtctcataaaggacatatttcctgattgagactccttaaggtttgattccttcaaccacttccattatatcaccaaaagctctttctaggctctttgaaacttgcatatatccaatttgcaatgagtgttaggtcatctcggtcgctattagagcaaattcctgccaaaatcgccaaacgatagagaagtctagtacaaagaggcccacgtcttcttgttgctagcaattagtcatggcacacttgatcacgcacagagcaatcatatgcctgatctttcctctcgatcaggtcacccctaatcaggagccatatactatacatgccaaagagactgtggtgagctaccttatctacggattccttgcctagacgagatccctgacgcaaacaatcgcagttctagccaagtgaaggctgtccagcatagatcgggtacctgcacgatattgtgtgactcttgacatactctcccggtgtgaaaagatgatcgacggaaaagtgtccgaatagatacctagcttccaaggcatttcagaatttgccactataccaccaagaaagctaaaggtgatatgctacgggacatggttgctatagacaagtgtgttcttcgcctgaaaacagcttacctgcggatccgttcccgtcgctccacatccccactggagctcgaagaagtctcaagtctgttgcaactatttagtatagctttgttcaaaaacagactgaaataggaagaaaaaagaaatccacttaaaatctcaagaaaaaaaccgcaaaatgacaaagcgttgaggggttgatgtcacatgttgagaaccccccgctaggtttccttgatctggaactctccccatcttctctccacctctccagctctccgcaccagacatgtcttctaccattgacagctcaaatattcccactgatggcacaggtaaactcaaaattactagagctttcattacagttctcattctaacaaaaaaaaaataggtgttatccaactggatccttggttggaaccgtaccgtgatgtcttgaaacacagataccaggtggtcgaggaatggaccaagaccatcaatgaaacagagggcagcttggacaagttcagcaaggtgaattcatctccattgatcgatgtcctctgtgctaatgagtttatcagggctacgaaaccttcggactgcatgcacaacccaacggagagatcaaataccaagaatgggcacccaacgccaaggaggcttctttagtcggtgattttagtacgttgtgtgctagccatatttgaggagcttgactgagactggcagacaactgggacgtcaatgccaaccccatgacgaagaacagcttcggcatctgggatgtaacggtaccagcgaagaatggcgctcccgctattccccacgagagcaagatcaaggtaagaatatctgccccgaatatcagcacggcacccactaagaatccgatagatcacaatggtgctccccagcggcgagcgcatctaccggatccccgcttggatcaagcgcgtggtccaagacctgagcgtatcgcctgcatacgatgccgttttctggaacccgcccgcggatgaggtatacaagttccagtacccgcggcccaagaagccggaggatctacgcatttacgaggcgcacgtcggcatctcgtcgccagagactagggtcgctacatacaaggagtttacgaaaaacatgctgccccgcattcagtatctgggatacaatgcaatccagctaatggccatcatggagcatgcgtactatgctagcttcgggtaccaggtaaacaacttcttcgcggcgagcagtcgctacggatccccagaggatctgaaggagcttgttgataccgcacacgagatggggctgattgtgcttcttgatgtggttcatagccatgcctccaaaaacgtcgttgatggactcaatgagttcgatggaaccgatcacctctacttccatggcggcgcgaagggccgtcatgagctgtgggacagtcgtctgttcaattatggaagccacgaagtgttgcgtttccttttgagtaatctgcgtttctggatggaagagtatcaattcgatggataccgcttcgatggtgtgaccagcatgctctatacgcaccatggtatcggaacgtatgttcattttcctactatttctttagaaagtcccgctaaccgaaagaaacagtggattttctggtgggtaccatgagtacttcgggccaggcgttgacgaggagggcgtcacatacctcaccctcgccaaccagatgctgcacgaactctacccagactgtatcacagtcgcagaagatgtctccggcatgcccgcactgtgtctacctcatgcactaggcggtgctggcttcgactaccgtctcgcgatggctatcccagacatgtggatcaagcttctgaaggaaagcactgacgacgaatgggacatggccaacatcgccttcacgctcaccaaccggcgccatggtgagaaaaccattgcctacgccgagagccatgaccaagcgtaagttcaatcccccatctccaaattccaattatccaaccaactaacacacactcgcagcctcgtcggagacaagacccttatgatgtggctctgcgacaaagagatgtacacacacatgtccacgctaacggagttcacccccgtgatcgagcgcggcatggcgctgcacaagatgatccgcctagtaacccacgctctcggcggcgaaggctacctaaacttcgaaggcaacgaattcggacacccagaatggctggacttccctcgcgccggcaacgacaactctttctggtacgcgcgacgccagctaaatctcaccgaagaccctctgctgcggtacaacttcctgaaccagttcgaccgcgggatgcagctggccgagaagaagtacaagtggctctcttcgccgcaggcatacatcagtctgaagaacgagagtgacaaggtccttgtcttcgagcgggctggactactttggatcttcaatttcaattccaagaagagcttcaccgattaccgcgttggcattcaggttcccggtacataccggattattcttgatacggatgatacggcatttggtgggcttgggcggaatgttaaggagacgcgcttcttcactactgatatggagtggaatgggagggcgaatttcgtgcaggtttatattcctacgaggactgctttggtatgtgtctgacccttttcccgtctgtcctttgactggtttgctgacttttctgtgttcctcgcaggtcctggctctggaaaatactctgtaatgtgaacgccaatccatgtctgtgtcctgcacgcagcagagtccgaaattgaacatcttagtcctagtgttagcgtgatttgacctagtttcttcagtgtgatgtcctgcattttgtttctaactacggctatgtgtctagcaacgttttatatcatatacactcttttgaaagcattatacattgtcgcctcaacagacagagcgtgaaggaagatagtggtgcacggtttccgaaggtaataggaagatcaccttcagagaaataagtttcagtgcagaggcaccatataactagacaaaaagcagctagatataaaccacccgaatgatcgagggactacctgtatagggatgaacgcacctatctctaaccattcaactacaccactatacaaaatacgcaggaccaagaaggcaatcacaaaggaaaagatgtcgagaatcaggttttgaactctaaatacacaaaataatgaaacatgccggtctaggggggtgggttgtgtaaggtatctccaatctagaccggctttaaaatcccatcaagtcgctaagatagacgaacgcatcacgaacctctccccaaccaccgacaaaaactcacaacctcttcaacctcaatttccaaaccacgattctgccgtcggtagatcccagacatttcagattcccttgctcgggttcctttcggatcgagtctagacagaacgacaccagggagttccaacattgacgcgacaaccatgcagtggaaatggaagtgaaatcaaatccctttcttgttgcatttgttttctctcttagatcgggtaatgtacactgtggtaatatacacgcctcgaaaaagggaaatgatgttgtcgcgtacaacgttggaacactttgagtgttctgacaaagggaattaaatgaaaccgagagaaccaatagagaataggtgagggaaaagaggaaaagaagaggaagagcttgaaggtggagggggaagttaagacggcgctagctagcaaatgacaaaattacatttaggccttgttctcaagctcagccaggatcttctcacccttggcacgggcagcgttcatgtcgccaaccatgtagaaggcggcctcggggaggtcgtcaccctcaccagcaatgatggccttgaaggaggagatggtgtccttcaagtcaacaagggtaccctcgataccagtgaaaacctgggcgacggcgaagggctgggacaggaaacgctggagcttacgggcacgctcgacagtgagcttatcagcctcggacaactcatccataccgagaatggcaatgatatcctggagggacttgtactcctggagcatctgctggacacggctggcggtgttgtagtggtcgtcaccgatgatacgggggtcgagcatacgggacttggagtcgaggggatcgacagcggggtagatacccaactcggagataccacgagacaacacagtggtggcgtccaagtgagcgaaggtggtagcgggggcaggatcagtcaaatcgtcagcgggcacgtagacggcctggacggaggtgatggaacccttgtgggtggtggtaatacgctcctgcatcatacccatgtcaacagccagggtaggctggtaaccgacggcagaggggatacgacccaaaagggcagacacctcggaaccggcctgggtgaaacggaaaatgttgtcaatgaagagcagcacgtcctgaccctcctcgtcacggaagtactcggcaatggtcaaaccagtcagggcaacacgggcacgggcaccggggggctcgttcatctgaccgaacacaagggcgaccttggagggaccatcgagctggatgacaccggtctcctgcatctcgtggtacagatcgttaccctcacgggtacgctcaccgacaccacagaacacggagtaaccaccgtgggccttggcgatgttgttctaaaaattgcaagtataagcatttaatgcggatttcaagagatgggggatagaggaaatccttacaatcaactcctggatgaacacggtcttaccgacaccggcaccaccgaacagaccaatcttaccaccacgggcgtagggggcgagcaagtcgacaaccttgataccggtgacgagaatctcggcagaggtggactggtcgacgaacgcgggagcatcggcgtggatgggagcgaacttggtggccttgacgggaccacgctcgtcaatggggtcaccagtgacgttgatgatacgaccgagagtggcgggaccgacggggatggtgatgggggcaccagtatcctcggcggtgacaccacgggagagaccctcggtaccttcagatgacgttagtgaaagctccaatttacggttggaccacactcgatcaattcccccgatcgggtagggaacgacacggtggcccaagaaaggggtgggaaggggtgaagcttaccgtccatggcaatagtacggacgacattctcacccaagtgttgctaaaagcaattgttagctttgttgcgatttgaatcaaggttcagccaatcagatcacgtacagcaacctccagaacgagcttctggccgttgttggtggtggtcagggcgttgtaaatggcagggagcttctctccgctgaacttcactgtaagatggcgaatataaagtcagaaacggtttcgttgatgattttggggttgattgcgatggtttcggtgatggattgggtccagggaaaagattttcgcgaggtgcccgttccgtcaggagtcgataacacgtaccgtcaacgacggcaccaatgacctggtgaacctttccagtcaagagagcatcggagctagcgaagcgggcagtgatagccgggagagcattggaacggacaggctggaaagcgcgggcgacgggggtcgtccgggcaaaagcagccctcccaaaggaccgggcgagaccgctagagagattataaaattagtttccaaatgaaaaagacaggaagattcaatggatcctaaaaccatacctcttgaacataatgactgtgttgaagagcgagatgtggtgaaaggaagaggtgaggttggaacgggaaaagagggaagaagaggaagggaagaggttggtggatggggactggtcgcccttagcctttccggggcggttttgccgacgatcccgtgatgaaccgagcaccaacttgagctatctacagggaaaagagcttgattttctgatttagaatggttttttatatataaatcatgctctctcttatttttaaatatccattgccactagtatggtgtggtgaagtggtgaccgaggaagctcagcccgttgccctggaattcgcgcacacacaccgggtcttggcggccgggtgcaggggagccacggcttttggctcaatgacatcgttgccccggagaaatcttcgagatattgaaaacattgtcccttaggctggcggtgaaagggtgaaactagaaaaagatatcacgaaagtcaatggccctttggtccgaatatcggaaaaactctgacgtgtgccaattccgggtcaaaacatcgaacatataaaaacgtatgcactaaattagattccaagctaagattgttatgttcgttatattcagatggtttataatcttcattcctatttatatcctctttgcatttcatatctccatagaaactaacccgtattcttctgttactatcggaaccaccgtgttcccgcagggattctccgcacttgcgttggttccgaatcactccgtagaccacgccatgtcggagcgcaggggcatacacgtagatcgtttatcctagagttacgtccatatcaaactcatgttctatggctacaaaagagatacattgattatagcacagtacgagatacacgcattttccaatgcttgccaaaaaaagatagaatggggaacagtcgacgcgcgcacgggcggaggcccatcctccgatacaaagacatgtcgaacatctatggaaagagtagcttgcaataaaatcgacatccaggtcgtgcgacggatgccgccgtccgtcttgcgtagatatcaagtcactcccggtcgggtaactagaacacctatgacttctcagcggggccgctctggacaaagcccttgccttcgtagccctctttgctgatgccgtggatggggttaatcttctctttctgtagtcgaataggttagcatcgtccaatttgaccgaggcagagacttctcccgactgctgtcggaaggggcgtgagatacataccagggcatattcattggaggcctcctgccactccttggacatggtaccgggctgcttgccggcaaaggagtggacggtgtagaagatggcaacggaggcggcagtgagctggagcaccttgaagaagacgcgcaagccctcacccttgggggcctgggcacgagggccgtgggcgccgaaggcaatgtagtaagctagagcagaggaagaattgatgtcagtgaaaaacgattacttgcaaagataatcatggacgagggatcaggtgcatcccgtcatagataaccgcggaagcctcaggatagtcgaagcaagaggccgtctttcaagccaacacattctaggggtagtacgtaccggccttcttctcctggagggtcaactggtgccagtcgaccttcatacggtcacggagctgcatccagagctcggcctgctcctgagggggcatgccctcccagcgcttctcgatgttggcgagggtagggttggggatagcatggtccgaggcagcgcgggtctgcagggcgttcacagaggcagtcggggcagcacggaaggccgcggtgctgcgagggacagcgcgagagacggtgcgaagaaacattgtgcggcaggcgggaggtgggaggaccacgtcggaatcggtttcaattgatgtaattagacggaggtcgggagttggaaagccagagagcacgcctgggcacggcttaggagtgagtggaggagaatcgtggatggggaatgacttgaagacgtttcttgtggtttgaggtggaaaggcgaggatccggtcgggactagtgcggttttggtttggctgcctcctcattggctcctggcccaaatcggctgtccctgccagtgagcatcatcaccattctcagccatgtggcatgatgttgatattcttcaagtgcttatggacttttttttatttcgacggttattatgcctctattcgcaaggttccccagtgtcaaccagtcgctcaagtctttaggccatcgtcggaatctttagccgcatttaaactagcccagtcatgcagtagctttcgcaggaaaagccaggagttgtccagttgcctaactattctacattcaacaccatgcatcctgagatcttctcgtccgccacgtgcaatataaccgacaggcagcaagattcggtgcccaattgcccaagtacctcaacttgaagtaaaaatcattcagaacggaacaagctgagagtaaatcaagactcctcagacctctcgcaaaatggtacaaacacgggccaagtcgtaacggtcttgcattgcaactaagaagaaaatgggagaacggtgtgcaggaaaggtaatgaattgatcgttccgcggcgccgtcaagggcgcacccatatcagtcgcgcagcccggatccagccggcgctatcatctatgccttgccaccactggcctccttcaggactgtcttccactcgatatcggacttgtcatcggcgtggatggaagtgacgacgttgagggcgttcttgagaacctcgcgggtgctggcgtagatcatggaccactgaaaatgaaattagctattggttctgcacatgggttgaagcctgggtctggggaaatcttacgagagtgggggtctcgctaggcacccaggagatgaagataatcttgcttctgtgagaacaatcaggtcagcgggaggcctgagaacaattgcgaatatcagaatgcgcacctcttgccctcgccggcaatctcgtactcgacatcgtagacggcgtaacggggggaggcgcggccctggctgtctttggcatcggcgagctcgttgcggaagacctcgtagtcctggtccttgccgactgagtctacgacaaccgacttcttgtcgtcggcgatcttgtagatgatgtacttggtcttgccgtggcttcggctgaagtcctggaaggtggtgatacagtcatcctggatctggacactgtagggggcaggtgtcaataaatagtgaaagtgaggggaaaccagttgcgagcgcgggaaccgacgacgacttacccggatgcgagctgcgcgatatcatagtcagtattgagtgttgtatatcataaggttagaggtcaatacgaaccgacatgatggcttatgtagatgagaaagacaaaaaaaggacgggctgtctagcgctatgtcagtggctgagataaccaaactcagggggtctttcgagcttctcggattggcatgagaagtcaaagtagtatgcactccaattacttacagggattgaaggaggcggggatcgagacaacggagacggatgagacggggaagatggagtttgaggggtgaattgtttcccaggtgttgccatggccatagtgggggtggctgcacgtgatatcagacttttgataattaaagtgctcggtacctgtttacaagttgaatgacgtgtaaagaattgatctaatatagtttgtttttaagacttctaaggtatatgaggctgtttggagtttcgacttgaaaaatgacatatagtgtcagatatgttgaagcatcgaacaatatttgtgttctcacgaggtttttgctttttcatcctcgaagtaccaggtactccaaggattatgtacattaagatttataatcacgccatcttagcctatagctgcatatgtacggggtacggagtacataagacgttggatgtgagcctccccaatgtgggtgtctgcgagctaaaattggccagccttcaaccatgggacaacgtcagtggctaattttgccttggcccaccatatctactgtggtttatgcaatacaatatattgacaagctagatttactgcgtctgcctacatattgttcttttattgcttgactacggtgtggatatagcttgacaagtgtgagcgtttaacttcataaccaaaatatatattgtaaatatgcatagcggatctatatattcagacatataattgtcacgcataataacgactgatgtccatcaaggagtttagtgagctgcaggagaattctcttccttcagaaaactgaaatggtctacttcaatgtaggaaatgaatccacaagagagtgatgatattgtaagactagctctgccctcagcggcaaaaaaaaaagagaagagatacaagactcctcccatctgtcgatattgtaaaaagaagagccttgccctcggcgataagaaaaaaaaaaaagagacatatgacccctcccatctgtcgatttttatgcttccactagtagtgcgaggctggtcatcgcaagaaggtcttccacatcggtgcttccgctcggggcaagcccaccacagtcttcaaaatccctgagggtcttatcgattacttctgcctggccgctcatgtgcagaaagtttccgatgcaagcgtgtatttggagaagtctcggatctggaagttcccaacttccgttatgaactttgaaattgacaatccgatccttaggcaaaaaaaagattggccctgtaagggtatccggaaaggtcttgatatgatactggtggggaatttcagttgcttcgaaaataagtcggaattgaccaaattccctgtgaatttgggagtctagcatcatgacgttattatctgaattgatctgttccggggcaaatgacatattccgaagaactgggaagtagcgtcttagattaacccaaatcactgcatttctgtgtactatgctgcgggcattggcttaaaaggatccaagtgagaatggaatgatgtgggcggcttcaagatatgttgttaatgtatcttgtggataggggtaggcttgactgtatttatttgttgcaagacatttgtaactatctctttctaaacagtggcgccggagttgcgactgggagtttccattgatgggctcgatatctagacttttgagattttcgattgactcttcgaggtcagggcgcggagacggagtgacttcagtaggtgttttaccaccctgtgatttcaatggaatcaataacccggttttgatgctttgtactagttgccgaagcttttcgtcgtctgaacaccctaaaatgtccaccgccagatttgcttttccgtcaggaggaaggacctcgaggaagtcactgaggaagtccttggttttatctgtgggtttaagtggtttgtagctgttcagctttcgatccgttttctagcttgattgtgagtatcaaagactagaaggcataagagactaaccgtctggaatgatggcattccgcccattatctaggttagggtacgcttgagggtagtctagaaagtatggaagttctagtagaagcaaggtggccgaatcagttgtgacacttgagacggggattgatgattgcggaatgaagcgaaacaattagaatcaacgcggtgaaatgtcatcggctaactttggcagaataatccaaccggcagaataaatatagactaggcttaatctggctagacgatactttctatcagtaaaacccggttgtaacgaattgaatcagacacgggtttgaattcgttatatccaggtcttcgttaaatccagaacccatatatcagatatatatttctagatcacatacagatttatgctccaaaaaggccctgatctttctttgcttcctctactatattttcctcgcttctaccaaccttttatacttatgaaacgtactaattagtcgtgattcaccctactcctgctactctttataaaaatgaaggggtttcaaagcctgaatagccttacgatataggtccttagcctcttctgtaacgatctcatcctggaacgaattcactaaatgtaggaaaggatcctagagattattaaaggagagggtcaatggttatatgctttataaagccattaagcaagctctttactaggtggtaaacagaagggtcgacgttctgggaggttacactgcaacgagtatctgatggactctggccgtcgagatccctaggcgtaagaagagcatggagcagactaagtgatcacataactgcactgtagccaaattcatttctcattcttcgttccataggcaacataaaaaagacagcctaagtatgtagatatgtcaaaccccaaccctaggtacatacatctaaactgtaaccggataactaaaccttcggcgccggcgcaaacttggccctcatcttatccgcaacaagcttctcatcataaatgaagttaacactgtcatgcgcaaccgtcgcctcagcccagcgcttaaacctcggagcctgctctagcaaagcgggcaacttagccgaaacaagaccatgttcaggcttggcgaagctcaaaatcctcaacaagaacgagcccgcctgaacctccgccagggtcagtttctcactaccaccaaagaacggacccttgccctccgtgtctgccaggagtggctcaacctccttcacgacagcagcgaccagctgctcggcggcggcatcgcgctcggtctcatcagcggagcggatactggcaaagaaagaaggcaggactttgctgaagaaggcgtcgacgaagaaagagagacgcgcgcggtagatggcgttctcggttggcgaggacggtgggaggagatggctttggtgcgcatctgcgaggaattgggcgacaatgccggattcggctatgatggttccgttataggagatggtgggaacgaggccgcgctgttggaggtggctgttagtaaacagtttatagtatacgaggcgtagtatgaagtgtaggtgtatagataaggagtgggtgtcggaagagcgcttgtcacttactgggttgatcttcaaataccatggctcgcgcggggtgtttaggtcgatggtgacttcctcatagtcgaggccgagttccttgagggcgatatgcgcgcggtgggcccaggggcagacgcggttcgtgtagagaatgatctttggggcggacatgatggattgatgtgtgatgcacaggaggaatagaacttagaggagtagagcttagagaaggaagttatagtgaggaagacacgccattataaaagacattgcgaaatgaggggttggattagtaaaatgcaattgttaatcaatcgcgaaatcgagggattgactccgttaactccgttcccggataagaattgagcagaggtgggggattcggagagaaatgtctgacaaactcttggggcttaataatggagaaatgattcaccttaattgaggtctagctttgttaaaattggtctaaatatgtacatacattaaagcgtccactatatgtgtccgatatctgaccaaaccaccttcggcggcgctcagttatcagggtatagaaatggtctcaagtggcaaaccgatgtgtagtacgtaaaaagactggagatgtgccctaggagtaaagagcacatctgagtccgatgcgccagcgaccggttccacacgaatcaagtggaagaaagataatgagaaaatgtcaaactaaggaaaagacgagatgaccgtcataaaagggggtatatcgaatacgagtataaaatgagcattgagccgattgttgagatgttcggggaggacggccagccggggcgtaaaaagcactggaagggatcaacacgctgtcgtcaggacgtaattttgcatgaaaactgaaaattgagaaccgtgctcaagcttcctcgtcttcctggccgccatcgatgatcttgtgccagtgctgtggtagacagatacagaccagggggaaagccttgatctcgccggacggcaagggcgacggcatacccgagccactcgagacaccactgtcgcggtgttcgcggtaattcatgccttggtcctcggcacgttcggggagtcgcacacccgtcgcccagccatcgtcccagatgccaatcaccctcaacatctcgcctcggtcaagttcgaattcgtcgcccgctcgtggtgagtatgcccaaaggacggcaaccttgtcgccagcgtgaatctcatcttgagagtagtagtcccggaaataagacagctgctcagatcgaccactggtaactgcttcgggggaagagtatgggttcgtcgggccggagcgaggcgagctgtcgctttctagtccagccagaactgagttgctagagagtgagccgtgacgtttcccggtcaccggtgggattcgcttggacatagctcctggactggcgcccatgccttctgagtctgacgtgtcgctgtacttggccccgccgccgtacatcgccgcggaggtacgcgaataagcgggcgatgattcactgggcatttcgcgcaatgcagacatccgcgtgactcggcctcccgggaccatgttgtacgatgtcgggcttgggggctgctgcattgaaagcgatccgccctttctttgtgggtttggttggttgagcgcagcttcattccgtgtctcacgacggcggcggcgcgtgagaatacaaaaggcgaggagagcacctagaatggcggctcccacgacggagccaactacgatcccagcaattgcgccgcccgacaagccatggctagaatctgcgacggcggaaggtgagggcgtaagagggggtagagtaacagtcggtactgagacaccgtcacagcgactcgtggcattggatttcgtacagcaactatcggtgccattcgcgcaaaatgtgcagagaccaatggtatttgtcgcaaagccacagttgtcaggctcattcgcagctcctttgacacaatctccagaaagggcgtcggatggtttttcgcagatggtcaactcggcatagattaggtccgtgtagttcttgtcgctcgtggcgcataagtctgtatttgccatggtctcctgttcactccgggcccaaagtgcgcatgtgtcgacgcaaattggtatcgagtcgtttgtggaaagtttgcagtcggatatggagctttgcacgacactgctgcacaaaacactggttgtatactgggcatagtagttattgggggcacttgaattgatgccctggcatcccagtaagtcaacatatctgggagctcctgttagtgactcttctcccgatccattggtggcagcacatacttcatcgaaacatatgacccaaggacatagtcctttaatgaattatcgaaatccgtcagattcgacacacctttaaggaaagggctagcagcgcactgtcagcaattgttcttttttttaagcgcgcgtttccactcacaagtccgcatatagactggaactggttgaaatggacgagctatcccaggcaggacaggcacttgaccccgagagggaaatgcaagagctcgacatgccgggcagaatcggcggtctggtctcaaatagacccctttgggttatcgacgcggaatgtgtcaattgcgatcgagaatgttccaggcgttgtcgcgaatcgcacggatattcgaattgggagaattgaataaattgttcgaccccaggtcggaactgtctcgagctcgagaagaagaaaaacgcgtgaaaggtaaacgagtgactcggggttctcaatgcccggaaggaaaggtcaaccgagccccgtaggcctaaatttgaaatgagagaaagagatgacaagacgaagttctaagattggaaagacaaggttagaccttcaagatggtctgggcttgtgggtaacaaggggatgagctgggaaaaagggcaattatgaaacacggagaacaggcataatcggctgtacagattcaggcacgctaaactcaatattggctacactctgtgtactccatggagacgggttggacgcagtatagaagacaattgataaaagggggtgggggggaaaggaagttgtgccgtgttgtttacctttctctttattctgtggactctttttgggtatcaaaacgcaattgggactaaaattctacagacgtacgacatatggtgtactaatactaaacacaatgacaacggttatcttagagtcaactataattggcaatgtctgctgtcaatttctgaccggttgctctgttcatcaccagcctcgctagtgacccgttagcggcttagacaagacgatcactatcgcctcgagaatactatgaccagggtccggagcttaatattaatttcccgaatttcccttgcatcatgcacacaatttggcaatagatgtagcacatttcaacgttgtatgtgagctatcggctgaggatgcgagggaccgaattggacttggtacggaatatggagtacagggtacccaatcacaagcagtaagcagccggcagttgcatgtaccaggtacttacaagcatagtactccgtataacctatgtgttaatcaatccccccgcttgggcagatagttatatgacaagtctgttcctatagacagttagtaaatatacctataccttactttcaagtagagggaagtgtatatcatctaaagtcaggcggagtacaatgtagggcaacgaattacagaggtcatgtgaccattgacatcatctgatctggaggctgccgtcagacaatctgcgactcgtcggtggaaaacctttaaccattgccaacacattcccagtgtactcgataacaactcacactttctatcagatctcagagaccctgcgagccatgtgcagctccgaccttttcctagcggtactcgccgtctttttcccacctattgcaggtaacttttaaacccgcagacccgcacgccaacacacctacacttggtccaatgctaaccaaacccccgcatcaacagtctgggtcaaggccgggttctgcagtgcagactcgttcatcaacataactctcaccctactctgcttcttcccgggtctcatccacgcgtggtacatcatcctcaagtacccggagcaatacgacgacgatgtagcctacgagcccatccccggaggcgggagtcggcggcgcgatctggagaacggaaacgttacctactactacgtctcacgacagccccagcgcggatatggcacagtcgacactcaagaccagcaggcgcctggtccggcgaacaaaccacacaaccagactgaagcaagtggaaatgctgggagcagcagtgcgcccccaccaccgacttatgctgaggctgtgaagggtgacaataagctgcagagcaatgaacgagagtgagcactgactcgttggctttgcttgggtggcgtcctcggcttcccatcgtctcatcggtcacctatttcccgacccggttgtgttgtccataccctttcgcttcactgtttttgtacacgcacttcttgagaactgcatcgttatgttatgactttgacgaaggaacgttctatgtaattctgacttttgattttgttcattgcttgcgtatcttctttgattatatgttatttgcgggatactataccagtactttttatccttacctcggaggcacttagtaccaactgggcttttggtttgataactcctatcttgtaggtattattctcaatcttaatatagatcttcttgatttgagcttctaccacgcattggcaaatcgttagtggatacaatgagatcctgctttagtagccagtgggtgctctcatttcgggaggtggctatcttattgagatgaaggtattgtgaggtatggatgtgtaggaacttctctgggcactcgtatagccactcatattgtatataccccagaatggattggaagattggatcagcgtatcggtcctggaaggctgtccatctctcagtgaaactgtcaaccttctcgcgtaattcctttgctttctgggactttgtgttgcgttgagaagccagggaggcggtgaactgagggcttcttgttgctgagccttagtgagctgttccgatagaatcggccaggcgttcttcatgatgcaaatattgatataccagatacaaagcatgttctttgcctttgcgttcggggactagatggttggtcaaatagaggaccgttgatgatcgagctgacggcatcaaaaacatcagcacttcgtcattgagaagctccggtatgggccagccctgccgatgcgattcgcattgatccttccagccacgctatatttcagattcttacgagctggcgtgtaaccctgggacatagtgattgtgcctgcttcgtagtcgcggaagacagagcgcagttcaaatactttttaggttatcctagctccttcatgtcgtagtgctgcagtagttagtcaacgacctggtcgatttccttttcagtgggtgcagcgatgatcaacgtgtatcatcatgatacctagtcaagtccatgcaattgtcgcctgttttgatttagatataaggatcgcccccgagaggtcggaacccgatgctatccatttctagaggtatacggtgtctcgaagtccaaagacccaaagagtgtctgccttcggcgtcaaaatattcgaaacctgagggttggcgtatatagaccgtctcggtgttgaggtacgcagccgtaaagtcgacttatatccactatagaacgacacagtgataggtatagtggtatgagggatgtgcactgggctaagaatatatgatgtgaagtaagactgaaggggcccaaaataggcttgacgtctcagcgcgaggtcccataagatgatatagatgcctgtcagggtacggctaagaacgagagatgacatgatatataggagtatcaataagcgaagatgtcaaaagaaaaagaaggacgagatactgaatattgatggtaagtaacattgtccagagcacgagatgagtattaaacaaactctagaaagtcgcttgacaaaggatttatgcctttatagccaggtagttcatatttctttggataacgttttacaaactcatgctgattcataccattcctatgtatatttcctccgcatatggtcgaaaatactgatagcttcaggttttagcgactcgggtgttcatattgacgccaaggtcaactatgcaggacattatgatcataaggcgtatattggaaagacggactgctgttatggttaacgatgggctcgatatgggtttagacttgataaagcctcgaggaaaagggatcgtcggtgcaatggattgacgaggtaggcaatcggagctatggatgtctctcggtagaggggtaaccctgtaaagcccgtttcactaattaatcggaacattaaatgcgattggccaactatatagtacataattaaaacattccaaggctgtattcatagaaaattgctacaatgacctacagcaatctgataagcctatccgaggccaagttccgtcccgaattgatcctcacctagacactctttacaccaccaccacttcctgccacaagcctgtggcctttgttttggccatgcagtctatgccacagctgcttaggcaatcactccgatcaagtctccgactcacaagcccctccccagtgcgagcgcacttccgacctgcattctccgtcagaccgactccgcggagcttctccgcctgtgtacaatgccaattccgccggcagccgagcacatatttggccctcaatgaccgagagaagttctccgcggatacagagaggttaatcagggaaaaagagaaagaactagccgagctggagctcgcctcgcgcgaccctgtcccgatcccgggtctggagtcgggcagctcacttgattcagtacctcctgcggaggacgaacagagtgccgcacaatcgaaaccacaaacaaaggagcatgaaaaagagaagtcagtttcacaggaagaagatgccagtgttggcacgaggagtggaggcctgccatcgtatctggaaagccgtcggtcaaaatggtccaagcaattcagcacagtgatggacaatttgcaatccaatgtttttgtagcaggtcagcgtttaaatgacctgactggatactccagcatcgaagcattgaaaaaagatatccagttctatggtatgtaccatagcaatgcccgaacccgaccccgcgaaacctaagactaatcccacgaaatcatgcagagaaccgactccgcactgcccgagcgaatgtcaagcaagcgaaagaagactacgccgcagcgattaatcgccgatcgacttcccaacgcgaagtaaacgagctcctccaacgcaagcacgcctggtcctcaacagacctggagcgattcaccctcctctaccgcaatgatcacacgaacgaggtcgccgagaccgagacctcccacgctctatcggccgcagagcgcgaagctgaagaggctgccgcacaaatgagcaagagcatcctctcgcgataccacgaggagcaagtctggtccgacaagatccgccgcatgtcgacatggggaacttggggtttgatgggcatgaacgtcctattattccttattttccagatcctcgtggagccgtggcgtcgcaagcgactcgtccagggtttcgaggataaggtcgttgaagcgttggagaaggagaaggccctgaaccgggctatgtttaccgagaacgctgtttcgatcacgccgcggtcgaatgtcactatcctccccgaaattattgattctaccgacgagaacataattgagactgctccttctcttttgattgaaccgaagattaccacgacggagaaagatgcgtccactacggggtccattgtctcggtgaccgacgctactgccgcccagtctctcaagacccgtctctcgaacattacgttgccggttctgtcagtcgagtactggaggcaggtggctagcgagttcttcagtgatcgcagcattgctgtctcccaatacgatctcaccgccgtggctcttcagagtgccgcagctggtgcagctgtgacgggcctactgttcgccctgatcggatctcggtgaaaaaatcatttcattcgggcatgttataattgcattaccagcgagagcgcaccatgtttcgctcatgtttggtcttggcattttgataatgacttggcattttgttgggtggttatatacttgtacatacaattgagaaaaatagataaacagttggatataacccgggaattgaatttagtgtataactactatttgagaattctggcctggaaagcgaccatatatcaaaatagcgaagcattgacgttatttgttgctttcataagagaaccaagcaagcgttgaacaaaggaaataacatgactaggtgatacactaaataaagaacatatgtactcaaggagaccatcggacatcctctgaactcccgagctcgtgtgtttgccatggagaaagatcaagatccaggaagatacggacaaaggaaggaagaggctcattttttgtccatattaaaacacaggtctcttaatcttgacaagacacacggccgctctgtctaaaaaagggaagaaaacacacacacacacacacaagcacatacacagatagataggacatacaatccgtccatcttatatcatccacacttttaatgagactcgcccgttggcggcgatcaaaaaagggtgtattcaaaaattcgcctatccgataatcagggtctcatcctcggggaagctgtaggtgggaacctccaagttcagaggggcagggcccctccgaatacggccggagatatcgtagtgggaaccgtggcaggggcagaaccagccgccgtagtcaccggcctcgccgatggggacacaacccaagtgggtgcagacacctgtagggaggaaggaaagttagaaagttgcgggttgttgttcgccaatcccatgttcacttaccgagcatgacgagccactcgggacgctggacgcggtcctcatcgggctgggggtcacggagagtctcccaattggttgaacgggcctcatcgatctcggcctgggtgcggtgacggatgaagacgggcttaccacgccacttgatgatgacctgttggaatggatgttagatagggatcctgggtaatgggatctgtcggatgaggtggtgaatagaaacacgtacgttcttgccctcagggatggcaccgagagagatctcgaccttagcctgggccaggacatcggcggaggcggacatgttgaccaggaaatctggagagaaagaataacatcagtcgtttgttcaaagtcgcccaaatttccccaattattcaagaatattgttcaattactgtattccatgccatctctttctgattcgaagattccacaaaaacctaccctgaacagtagccttggcaccgacagcggtcgccagaccgagggtgccggccatgaagtaggaaaagacctggttggtgcggggcgagttgttggacttgtacttgctgaagttggggatcttcagggtcgagccgggttcgttagcactggcgaagggggattcgaaagacgacttcgaatcggcgactcccctccgctgctggcaggaggtaacggcggcgcgggagatgggtagctgctgccgagcgacggtgcgcagcagagtgctggaagcggaggagagcgacattgtgagggcaattgaccacggaggggaattgtgccgcgagttgtggagagcgaggtgaggatagagggtggatgaagtcggaagttgaagttggagccagagctttcgctagcgatcggaatcacggggcctgtcattggctgaccggttcccgttcactcccttgacaagaaaacattctacaacttctatactacttgaattcatatctaatgtattctgtgaattgatattgattaattattcatgtttctgctgaaatttgactcgtcaattgtatattatcacattttcttttgttatatctaacccgacccaatgcgaccaaaaccaatgcgcagggaaacccatcattagaaaactccaatgcaaacaacaagattcaagaaaaaaggataatgtagcgcaatcaatcttgcatttccacatcctggtcatgggttgccatgggctcgactgtccggtccgcaatcaacgcactcacagggaccataggccgagaaaccgacggagatgatgtctttgaatcttctttttgtggggtggcatctcccatcactgtgccatttgctggtgtcggaggtgcaattgtaccgttgagagtacgctggcccttctctatggcgccttgattcgccgcatccttcgccttcttctccttgaattgtttgtaagtcgtagtcttgggaatcacgtcggaaaggaactctagattgtcggtgtgtgataccgccgaagctattgtacgttagcatgctgtccgacctcttgctaaccgaggcataggcgtaaccaaccgagatctttatactggacggtcttgcgtggttttcgctccgatttgaccacgttgtgcccttgctcggcaagatattggatgaacatctcctagatctagcattagtcggtgttctcgaggtatttaggtagagggcgcggcatacggtagccattgcgatgacgaaggtcgcgttgttcgagcattgcacgatatcctcatccaactgaatgatcttcttaattcgagcaactatagaaatgtgttggtatgtcaatccaaagtaatagttgtgtctgggacttactcggaagtgcactctgtccggtgatctcatccggctctcccacagtctttggagccatgatgattgattctggcgagataaagtattggcaggacaaatttatacaatttgcagcatgctccagtcaaatattcccgttgtgaaagcaagtgagcgcgagcgtggagtcgagaagagtgaaacgcgtggccgcgttatctaaggaggctctccgttatcgattcaagtgtacttggcgacttcgctttgtcacatcatctactttcaagagcttcattcaccctcgtcccctgaattgtcgcctatagcgcgttaaagtagcaccctagagggatcggacttcgaattcgagagttcctcttctcacatcaaagagcgcggcgtccatcggggacatagacagatcatcgagtcaactctaaatcgactatgctgaccctacctcctcgaccaatgttatgacctctacacgcccctccacgacctttaataggtccctttcagtttcaagagagcggcgcagcccgcgaatgccacccagtcgttctgttccctcccccgtcgaccgacgaggcgattccgacaaccaggaagcacccgccatcccagaagagattagtgggatcaagcgatatgaagattttaccacaatagactgggtccaagatgcagtctatgagcagtcacggcgacgcgcgaaacggcgcagtggcactggattctgggatcaggaaggcatccttggctggagacggaaaatgtacgagtcatacgatgcaggccaggcatggcttgttgttacgcttgtgggcttggcaatcggattaaactcggctgtgctcaatatcatcacggaatggctctctgatattaagctgggccattgtactaccgcattctaccttaatgagtctttctgctgctggggtgccgagaatggtatgttcgggaggttctacagcgcttcttgtaaactaactttttccataataggctgccccgagtggaagaattggacttcgtggtggctgttaaattatgttttctatttctttggcgcggtaagacgtgtgcccggctagtactcgagaaactatgaactcataggctaattcggaagacagttggtactttcatctatcgctggagtcctggtcaaatcatttgcgccgtacgctgcaggctctggtatctcagagatcaaatgcattattgccggcttcgtcatgaagggcttcctaggggcatggactctcctaatcaagtcaattgcccttccactagctattgcgtcgggcttgtctgttggaaaagaggggcctagcgtgcattttgctgtgtgtaccggaaacgtgatatcacgatttttcggcaaatacaaacaaaatgcatcgaaaacgagagaaatcttgactgcctcagcggcagctggcgtggctgtcgcctttggcagtccaattggaggcgtgcttttctccctggaggtgagttcaatcgtgcactagttgataggacgtaagctgacagtcaataggaaatggcaaactattttcccctcaagactctttggcgcagctatttctgtgccttggtggcaaccagtgtgctagcggtacgtttcccatattgccaattgagtctggaccacacctgatccattctaggctgtcaatcctttccggactggtcaattggtcatgttccaagtggaatatgatcgcacatggcactttttcgagttcatcttctttattggtcttggcgtcttcggtggactttacggtgcatttgtaatgaaatggaaccttcgaatggccgcgttccgcaagaaatacctctcacagtggcctataaccgagtcggttgttctcgcgggacttactgcagtactgtgctaccccaacatgtttctgaagatcaacatgaccgcaatgatggagatcttattccgcgaatgcgagggtggccatgactatcatggactatgcgagtatgattattcgcctccatatgcatgaaagaacaccactaactcattgcaggtccaagaacagatggtcgatggtcttctcgctagctattgcgactgtccttcgcactgtgttagttattatttcctacgggtgcaaggtgccagccggtatcttcgtgccttcgatggctgtgggggcttcattcggccgcatgattggaatcatggtacaggcattacatgaatcatttccccaatcggcattcttcgcctcgtgtgatccagatgtcccttgtattacaccgggaacatatgcgttcctgggagccggggcagccctcagtggaatcatgcatttgaccatttctgtaacggtcatcatgttcgagttgactggtgcactaacctacattctaccgaccatggtaagtcttcattctaaattgcattacctcattcaaccatcctgactgtccttttacagattgtggtaggcgtcaccaaagccgttggcgatcgattcggcagtggcggtatcgccgatcgaatgatatggttcaacgggttcccattcctagacaacaaggaggaccacgtcttcaacgtacccgtatctcatgcaatgaccacaggcccgctctcggtaccagcatcggatttccccgtccgcgaagcagagcatctcctaaacgacaacaaattccaaggcttccctgtcgtggaggaccgcacttccaaaaccctagttggatacatcggccgaaccgaactccgatacgcgatcgaccgcgcccgcaaccagggaatggttgcgccaaatgcccggtgcgtgttcaccaaagatgcagccgaggcagccgttgcacgcagggcgtccgtctcgcaccactctcggtcatcagatacattcgatgcaattcagaggagtgtgggggcttctttcgtggatttctcgcgatatgtcgaccacacgccactgaccgttcacccgcgccatcctctcgaaacggtcatggagattttcaagaagatgggcccgcgagtcattctcgtcgagcaccgcggcaaactaatcggcttggtcaccgtcaaggactgcttgaagtatcaattcaaggtcgaagccgaggaacatacactggccgcaacgagttcttctcaatatagtgcgcttggtgggcagctgaacaaccctgcccctgaaacactggaagatcgcttgtggcggctcatccagactgccgctgcgtttgtgtctggtaagatctctcgccggccggtccgaccgcgtgaccgcacgatgcctaggcaaccggagcattcggatattctcgaagggagggatgatgacgcggtggtagaattggaggacagagaagaccggccgatgatatgaaatgcgggatcgctatgttgccacgtttatacgttacattgatagagagttatttgctacatacggaacgttgcttgctcatctatttcccataattgcaagctcttatgtgtttaagccaacggaggcaagaactggaatttcccatattcgcctaatataatctacacttgcctcaactaaattctctgatacgaaggttatcaggacttaggattgttcatctcggggccttggcaaacgagtttcatcccccaaacctgctaaaagatctcgtgaccagccaccgtccagtcctccgaccacaacataccgacctcattacacctatagccaccaagctgtctaaataccatctcccgggagtaacatatctggccggtaatgtagcttcaagttcagcttcagtcgcatccctcgccaattccttcatttacatggattgttacatggatcttggcatttatatgcctaatgcagtatgtggggtaaccctatggtataaatgcatttttattggtgcataattaacgagctagccattttgggacttgtgcataaaaccctatcacccatactccgtaactactccttggtcatatgacacacacctaagagtgatttaatattgctccgcttcgcttcaattattcaatcttgaccgggtctacgatgaatattcccagacaatgaaaccatctcaacaaccccgcactattcagacggagttacagcacgaacgctatgggcaatttcctggacgttggattgagcagcccttttaaaggctaagtaaggttgataggggaagcaagatatcctgggtctggataattcgatgagccccgtgtatgtacatattctttctcaatatcattatttagttcatcgtctttcctcttcccttcctcttgtttttttccgagcgagtcctgtcgatatatacaatacagtcttattctctctcctagttgccttcaaggcttttcatatcatggtcagtttgcatgcactatcgctttcgtagactcatcatccgtatcacttccttgtctccttgtgaaacgtgagagcggaatgctattactttgatagcggcgtgaagtactttcaattcgactacctggatgatagcctcggcgactggctgactgtgagccgccagagctgcttggaaatagccttggaaacagcttattcatgatcggattggttgccgggatgctagcagcgatgatagcgacagctatctcgattcccgaagaaatagagatcccaaaggtgtcccaggaggggtctgagctttggtataatttcacaatgtagactatccgcacaatgctggctatacacgcacttttatctagttagcactaatgcatatcaaattaaatcacgccctggacatacaacgaccctagtgatagcaaagcagcgacggcaaatttcttgctagttttgagatgaagacctgaaattgattagagtaataactagagcgaatcggtgaccacaaacctagaactgttctcagtggcaagagaagaatccaaatatccgtcaccagagaaagcgcggcacccgcataccaaaatgggatagatgcaaagcaggtatgatgttcatatttctgttcatcgaagacggcattgaccggggtacactggaatatcgttgcgaggataatggcgacgctcatggccgtgacgagtgcgatggttccaaggcagattactcggatgttagggaatacgcgtaggtatagcagacagattgatactttgatcagaccgctgattaaggtataaataatgtgagtcacgtatcgaatctatattgttgagactggttagcctcttctttccaattgcgttatgacagttatcattctgcccataccttcgccgaaggtagcacatctgctttaacgagatcccatttatgctttcctgttccatacctgactcctactcacatataagagacgaattaaccatataagaagtagaaggcgtaccaagtcccgcaaccaccacgttcacaattgccagaaccgtcgcagtcaccattatccagtcgtctaggccaaacattttcacgatgaagatcctcgaaattgtacgaaggcctacaatgagtgccgcgaggcccgtcaccgtgccgttgatgatcagcaatataggcccacggttctcaacctaaagagacagttagagaaagctctgggagactgctcttcctctgagcctttacttacatcagatcgcgtctgaaagagcgtctccataatatgttgatgtccttgaaaagaggacgggtcttaggccccatatgaactaatttttatccccgggatccttcgaggtatgcattggccttttgcacccatggatctagggcttattctttcgggcataaatcatacttccgggtggcccccaaacactaatttaatctaatcacagagaccggctgtcgtaatctccgcccgtcttgctttcgcttaaggattgagctagttactactaggaaaggctctaacatatttcacatgcgagcatcaagttgtaatttaccgcatttactatgtgtgcttgcgtggccggcttgcatgcggatgtcgaggcatagatccggcgttttatcccggtggataagcagactgcagggagcgaatgccagtgtgaagcgcttggacaaaggcgctaacctcggtgttatcaccagttatgttctacaggatctgctagtacggagtagtagtaatgaacgatccacctttatcaccttggcactttaaaaagaaattacaccttccgattgcttgggctaggcaataaaagggatgttataatccttgtagaaaattaatctactctgaatagccttttttggtttcactttgtttacaatacacacacttctcgacgttcaatgatcctgatgccttctcttttgcagaacctcctgctaacaattcccctggcatgtctagctagcagccatgccatcagtgattcccttggctcgaactataagatcgatgttcattcccatgtcgttccgtcgatttggaaggaggaattgatctctgcaggctacccagtcaagaatggtactttgtatacagatggcttccctgtcccagattggacattggatgcacacattagcaccatggacagccttggagttaattattcgacaatcagtgtcagcgcccctggcgtcttcttcctaaaagatgccaaaaaggccaaatccttggctcgcagcgtcaacctcctgcttcataagtattctcgaactcatccgactcgacttggagccctctgccttctccctctcccttacgtcggcgaggcggtcgaggagttgaaggtacccttcttttcttcccctagtagattatctggtcaaatctaacttggaattcgtagttttgcctggatacgctcgggtttgttggcgtggggctgtacaccaacgccaatgggacgtatttgggtgacaaagcccttgaccctgttttctcggccttgcacaaacgcaatgccagcgtgtttgttcacccagcttctccagactgcacatccgtcgcccaaggctggcccatcccgatgaccgagtatcctttcgacaccgtgcgtgccattgagaacctgctgctgactggtcaacgtgcacaatatccggatatcaagatgatctttgcccacggtggtggtgcaatcccattcttggccacccgaatcgccggcatggcctccctttcctggttgggtgggctgtcggtcgttgaatccctggcgcaactcgccggatattattttgataccgcttcctcgacttctgctattcagttgacggctttgaagagctttgttggcgtggatcagattgtgactggaactgactgtaagtgggcagtgccagtaacagccccgaaacagctgcagtatactaacacatacagatccgtatgttcctgtctcccaggcaacgtcgggattagccgcgattgagggtaatggtaactttaccgcggtggagatgagtcagatcgatactctgaatgccttgacgatctttccgcggatcatcaaagctttgaagctcagttgagatgtatattaggcattgcttgtagattattaacatagaacagcttttttaatcaccgcattcgcagttaacactattcttatataattcatttcgtttttttgtgtcttccggtgtctatcaagtactcatgcaaagtgcaggagagctgtcttgattatgcatcaggcttagatgcctaaaagaactccttttaccgaagtgcacccagccaagggtgtcgcaagaggtcctcagcggaaattcgatcagtgggattgattttcatcatcgcgtgcaaaaaggagacgaactcatccctgacgccttggtcgagacctggcaggaatgcttccgacgccagccccggccggttcattggcagcgagttcttgatccggccattatcatcaaatatgtcctgaacaatgtccttgtttcctctccctaaaagctccttaggaaatggcccgaatagatccacaatctctcgtaagtgttccttgagctcataatggccgtctggcggggccgatccgctgaacatgcgaactgcccggaagacctcgaatacgacacacccgaggttccaccagtcggtgctcgcgtcccacggggcctgtattagaacttcgggagatcgaagcgctacaggctgtataatctcgctgagatgtcggtcttcccagctggagacgccccagtctccaagggcaatatcaaattcagcaacgcgcgtattgtcagtttcgttgaagtaatagcggcgtaaggggattgaggggatgactgagtactgttcctcggaccgattctgtttgggaatggcgacctcggccagataaccagattctataagggaaaaatccctaaacttgacgaaaatgttatccggttttatatctgatcgtagacaagaaatattagcatgtcatatatcataatgaccaaggacgaaagagcatatcatacctgtatgaataacatgatgttcgtgagcaaaatcaagcgccagtaggagttggatggtgaacctgcgcatcaccgagttcggaagtctactttcaatgaaccaagcgccgaagctccgtagcgtctcgcccatcagctcaaaaaccaagcagacgtgagttccattaggtccgtggtgctcaaagtcatctagcagatggcagacgtggttgtagcccagctgattgcggtccccgttctggagatgagtcaagatcttccgttcgaaaatgggggcttgcgtgccatcataacactcggcgctgagcaccttcagagctcggaactcattttcaatgccaggtctgtttgcgtgtgttatctctatttattccctttttctaaaaagattctactcactgtaccggctgtaggtctctgacaagccagactgtcgaatagacaccatatccaatcttattcaggaccttgtaccggtctttaaagacatcattgatataaacagggtgaaatcctcccggtcggtacacctgcgtgccttcctcgatattgtcgttggtattgtcgggcatctcggagaatagaacgacgtccgtaatgaaggtgagagttgaaaagctgaagctcagcaggagtcacagttgcagcggcagacagtagtgaaaatatgcaaatagacttggctacgcctcttatccctagatgtcttctcaagggggtcgattcagttcgtccaaataagactggcgtggtttctgggcggtaaagtcagcccaacgaacgttcatgaggtcaagactcaagtactactgaaaatgcgcaggtccatattcctttatatatttgtttgacacaatccacttctatattattgcactaaagtcgtgagccaattgtcaacgttgattagtcttccaagtccaaagggggttctgtacggagtagctggtacagtaagtcagccctagagccctatgtatatagttaggtctgagcgtgcatgtattgaatggtacccttgcaatggattactactttgtaattatgaaattgaaattgtaaaatggtctaatctattcactcctacggagtccgtcggttgaaaaggactaaatgcagtccgaattaaaatgcattcctgcgatagataatgcagattgtaagcatagaaaaggcgtagcggtgtcaaactggatcgacaactctaaagctatttcgatagacacaatgccccagatagaccaaaatgacgaaaatcaagcccactcggtgaactagatccccgattaggctatatgcaatcaaagttatgataaatagaacttacaggttaggaatcctaatcaccatccagcagaagactttacgatgatgcattcccaagcacatcgcacagaattacccaggatcagtatcggacgagacagcgtctctcaacaatcgcgctcccggagccaggtgacacgacgtgcctatatatccagcagtcttagcacagatcaaatacgagtaaaaccgcccaaatatgtagctagtcaaaaataattataagcggaagaaaatccacgaatacgaacaagcaacatctttatttgtgtgcagcactgctggccaacttttgcatccccagatcaaacagatggctggtacggagtagataatgatacctatgtacaaggctgggcctcgtgccccgcagcatacgatgaaatagatatatgtatatgtcttgttcactcccacctctataattgaatagtaaatcttttcgcaagttttcctcttcggccgtttgacatccaatccttctaacccgtatatgttatacaactctcctgagtcatgctcacaagcgctaatgatgtcgaatacacgaatcctatcaaacggaccgactcagtggaccaagcagtgattgcatacagcaagacggacactagagatatagcctccgcaagagtgaactgtactccgagacctgagctcgtgacccccctttctctccccctctcagctcacaacttacattcgaaaagaggagaaaacacttggcacactggtggtacagaccccaacgcaccggaacacgttacggtcgtctacgaagattctaatggacagcatgtcaccgttaaacatgttggtagaaatggaaaggctgtttagatcacgagaacttccatgctagttgatatcctgtgattatatgagaaagaagttatcggtacgcgggtacctacaagatttgattacaaacataaagcacttccgaggatatcctctttaccgaagtgttgtcaatgacttcggcgtatggcttctgagcaagtagtcaaggctagcatgataaactagcaaacaactcgtcgagatcgaaaatttccttgcgagtttcttgaatttttactgccgtatgtagtcttgcttggggatgcacttcttctctcggtatatagcctgttaaatcagtcagcatccctagccaagtttactttaatggatattgtcaaccacttacccatataccctagggcttgggccacgcccgactctgaatccgtcttcttcgcttccacaatgataacatttaaagcaacctcctcattttcaccgtaccagactccgtagtctgtccgtgccgagagcattaccaaatttccctagggcagctctgcaagggcagccactctctgtaaaacctttggtaaagccggacccgagtagctgaagcccgtatgctccgttttaacaaagcaaaattggaacggacgatatagtctcttgtctagcgaaatttccgcgagggagtattctggaattttcctaaagttcaaaaacccattcgcttcaagtacactatgcagaatcacactgtcaagctggtacgagcctccacccaactcgcggagaatggaccgccagcccccaagctccagttgtacaaaagaaaatgtcacatggcgaatagaatcttgaatactgtaaagaaagatgcccaaagcagccgaagattcgaatgacattcgcgagaaagtcaattcttgcagttctggcaagcacccagccgacgaaagctgggagagaaggaaagttgattcgcacttccagttgaaaataatcgtcagctttctgagagatttggcacattggatcattttcgccatccaatgtatagtcttggtctcggcatcggggattgcaaagcacagttccttgaggtgggaaaaggccgggataccaaaagtggcaatatcaaattgtgttagcttatcctgaaacactctggttctgcttttcacaatgctgattgagaaatattccatcggaatttgctcattagcgatggctttgagaacaagaccagtggcttcgtcaagcgtgatgccatggctgtacgcgtacggtgttgtataacttaaattgtgcagctcgaaagaccggcagttggacaggcgttttatcacatcgcaccacgcttgaatatagatcctttttgatgtggcatcaggggataatggtcctaggtagccctttgaatccctgacgatctctagcttgcggacacagggacaaaacatctcgtcattggctgcttcctcgacccggacaagtgaatttggtgaaagatcggtcctcaatgtgtgtacaaaagtgtgtgcaaactggcgaaggctgctctgataaatcgctcggcaggtaagtcgaagagcgcatagatcaagagactcggtaaacttgacaatttccgccaccagttcaactgggagagtatggagacctgacttgcgtgctatgttggttctcatactgatccgtggagtaggggacttgataagaaaagaaggaagagagttgagatgagatacagttgaataaaagagaatagtgagttggaagagaaggaaaaggaggataattgaagctccggtcttgtttaagggactggatagtttctcgataacggcatagaatgcggtcatcaaggccgctcccgttttggtatatagggcatcatcacaggtatatatagcttcattaccaaattatgacaaaggcggacaatggaaaaagagggcagaatagaagatgtaatttggggttatatcaagccatatataggaataaagacctgcattatcagacagatgtgcaggcaaacatataaaacaagctagatgaacatagccctttccctcttatgatttgatgccgacatggtaatacaaagtgatgaaaggaaattgaacagtcttttgtccactgtggaaggtccagttggtgagatcaagatctggctgatctagcagttgccaggtttcctttgtggtgcgagttcggaggcaggatataaacccatcaacgaagatagtcagaggcgctacgggcagaataaatgtgaaaaagagatggactggcgaatcccagtaccaaataagagttacaaagaaagtccaaaagaagaccaaaggcgaacatagacaagtccaaagatcgcgtgacgtgatttcgaatatgctgaaggggatcggattagcttatataacaagtggttttaatagattgatgacttgcataaacgaatcggcggtctcaattgcgctcttcagtattcctgctgcatcttcgtctccgaagtgatggaaacaaatgttgaagatccgacactcctttttcgaactttctgcaaatcgaggaacagctcgagcatccaccgcactctcgatataagtgacattctgctgcttcttcgagattcgctcccactcttcaatatgggggtaaagatcgctcaacacaaaatgaacagggcccttaccctcggattcgagctctttattaagctccgattccaggactggggtaggcccaccggcaccggcacatatgtccaaaactgtgtaagaggaaagatctttaagatgctctttgaacactacacatgcctgtttcgcaagatttccatggctccacccgggagctcgaagattccacagttgggtgagaaccagttgctcgtgccgatgaagccacgatgggcaccaatcttggtcgccgatctctagaagatgtgaccgaggccaggagaatagttgcattatgtgtgcttctagatattggtgagaaaagttgtctgaactgagataggccgctgacagggaaatcgctcagtcacgtgccggcccaccgactcttggggacaccttcaagaaataaaacacaatgacaacaaaatatactaagttgatcgcttgtgtctttgaaaagtcgtgtcgtcttggatattacgtgtggttgtatccggggcgaccttgggatgtttcaatccacaaccccttcacaaaatatgtaacttctattcggtcttataacaatgcaaccaacccatcttgtcacccatgaactaaacctaaagtcctatacatccgtggatatatttctgcacactaactgcatggtggtctcggaatttgcactagtcctaattcggacctgacgcagttcagggaacatcactttgacaccaacggagaacatgaaggtcgttattgtcggcggaggtctaggtggcctagcatgtgcaattgcctgtcgccgtgagggaatcgacgtggaaatcctcgagcggtcccccgaagtccacgaagttggagcaggaatccaaatcccaccaaatggcggtagaataatgtgcgactttggcctgcttccccaactactggagcaaggaagtcaggtgcaacaagtggattttcggaggtacaaagatggtcgtcttctgcgatcaatgccatttggggacgatatcacggaggagttcggggcgccgtggatgtacgtggttgattgccttggcgcgacattgtcagactcttaccctttgcagaattattcatcgggtggactatcatcgcattcttcttgatgaggcaatccgactcggtgcggtccttcaactgggggcagaagtagagaatatttacaccgagcagccagccgttcttcttgctggcgggagacgcatatcggcagatattgtgattggtgctgacggtacgtttatagatcttttgtcgaatatatatttaaccatctctactgacaaggaaaggtcaaatgtctacggtccgaagggctattcttgaatctcctcattctccagtccccacgggcgacatggcctatcgagcaaccttttcacgagagcagctggagtctttgggtgatgaaagagtaaacaaactgtgtcagaaaattgccgtcacaagctggttgggaccggagaagcatacgattttctatcctctccgtggtggaaatgagttcaaccttgttctcgtgcggcccgataccttatcattgggttcgcgcagagagcagggagatattgaggagatgcgagagagctacgcaaactgggatgaaacgtaaggacccttggaatagtcgactgcaatttcctaatatgcttctcgctttttagattacaaaagctggtttcgtgtgtgccatcggtatataaatggaaattgacacacctctccgagcttgaatcgtggaccaaggtcggtacaatactatgtccttccaatcacgaacttgctaactaggacttactagggatctgttgccttgcttggtgatgcctgccaccccactctgccatatcaagcacaaggggctgcaatggctgtcgaagacggagcagtcattggcaagcttcttggcctattgcaggtccattatctggatcctagaaattccggaagcgatccctcaatatccacgcgatcttcagctcaagatctcacagctgctgtgcttactctctacgagaaatgccgaaaagcacgcacagcccgaaatgttcaaggagcaatcatgaatcggaagctttttcacatcccagatggctttttgcaaatgatccgggatttcctgttgggatatgcaggagttacccggaagagcgattggacatggctgtcttcatttcggcaggggcaaacccttggtctagatgtgctggaggattgccaaaaggcctttgaggagtggagattgaccctttaattgcacatcatgtggtgatagatggctatacgtcactcctacatctattgctatactatagatccatctacaaaccccatactcgatatcacttccgtacatactaccaaagccaacccaaatcccatcaacgtatccaaaatctctagatcaattacagattatagatccaaacaacctatataacacctaacctcaaacccatcccaaagctaagccccttcccgcatcccaaccaaaatacacccagcacccatcatcccagcccccaaccaccaaagcccaccaaccgcctcttgaaaaacaaccattcccagcagtgccgtcgccaagaaattcgacgccgtattcgtgatggagactttgaccgtcgaggggccagccgttagcgcacgcgtgaagagtgcccacattattatgttgcagaggacgtttaagccgaggcaggcctgggtattgcgttagtaacagaattacagtataacacccagttatacatgtatattgtagtagataaatagtccagagacatgcatagcccagagacaaagagaaggggtgtaaacatacacctcgagtgagcatctcaatcacaggcgatgactcgagaccgaagaggtgagcgagggattgcgcgaaggccgttgtgtggtcgtccgtggtcctgtggaacgttagcatggttcgtggttacacggatcatagcttatatagctttttagcttgtatatatagagtatttctcctatcttgttatagggtagataatccacctacaatttcgcgaaaacaccgttcaatgcagcgaaggcgccgctcgttattgcgagcacgatccagggggatgtggaagactgagggattgactgaggcgttgaggtggacatgactgcggttgatatataactgtatatcctgtaatttatcaggctctttttataggcttgcaggctatgtgcaagtagcgtagaactcaagggctaggtattttggagtgacgttgaaggagcttgcgtgccaagactgatagtgacagataagggaggctgatatggatgatcgacgcgaaacatcacgatagctcaagtagcacttgtttgattaaaacgtcgagtataataccagtagatatgcaactaatctctatccatcactacggcgacagcctctgaactcgccatttagcacccgccccctcaccctcaatacgcacataccggaatcgatcatgcaagcgactccgccgtccttgccagaactccacagactccggcacaagcctcacaccaccccagaaaggcggcaggggaatatcttcaacacccgcaaacctctcctccatttccttaacctttgactccagtagcgcacgcccatcatcaacatccgtctgatcaatatccgccggaacaaccgagtctagcaacttcgccacactcttcctccgctgattctgctccatctgggccggctccgcagaccacaaaaccctactctgccaactcgcccatcccccaatccgactgccgcgctcgcgggtccgccaatacatctcgctctcctgacgactaagcggctcaagcaagccctcaatacggacctgacgctcaacactcgcccagctgaacgtcagcgcggcccatttatttcccgagccgacctcagaggtcacggttggctgtgagcccggttctggcatggcgcccagtgtatcggcgctctcgccgagcccgaagacttgtccgcccttgccttccctactaccccagttgctgtagacaacccagccgcgctcgtcgagttctttcaggtatacgacgcgtgcgctaacgcggcccgagggcagggaggctgttgatagggtgcatgtttctggggcggaggaggctgggagccgcgagtcgcggaaccagttgtggaattggtagaggggatccgtgccgtggatttgtgagatggttaggggtgggtttgtgccgaactggtgtgcgcgtgcggcgttcgagaggacttcggtttcggttgcggttttgtcggtggttgttgcggggattgcttggggttgggcatcttgggtggacttgttggaggttggtgcaatgtcacctggtgcgactttgggagattgatgttaacttgaggttcgtatgggttggggaggggttggtcggatcttttgcagagggatggcttgagatgtagactttggacttacaaattagcttctttggacgcctcccggcgtctgtctggcgttcctcttgggccatagttggcttgtgattgccgggttggttggttgagttggttgaggaatatcggagttggcggggttggcggggaacggtgcggaggaatgagtcaacggctgaacgcagaatcaagggtaaacaagtctgcatggaagacgatgagtgaatggcataagtgtaatacctcgaatttgtgagattgaagaaaagtccaagttggaagctgtgagttccgcagaaatcctgtaagacgttttcagcggaaactcccgaggcgtcatgccattccttggagaatgcggagtacaatagttagttatagaaaatcagacaacatgtttaacagtttaagtaattcactctgcttcattttcattttcgcgtttaaacgcggtgggagagttgagatgtctatgaacaggaataatcacagtggtatacagtgcttcaatgcacgacgccctttttgatcgccaaattaaacgccggaccttcgctggatgccaaaatatatcgtaaatccaaaaacaaataatagatatcccaccaggtatatccaactgccgccctgcagacgccgaaccggaaatatcccaacacagggatccagccctggcagagagattgtaggggtgcaacacaaacattaaatgggtatcacctggtcacatacacagccaagagaaattagagagacgaagaaacaccgatgagatcgatgatcttgccggccaccgcagaagggtatccgcgcgacatcatctcctggacgacggtggcggcattggcgtgatcatcggcgctcaggaatgcacgagtcattgcttcgtaggtgctgggctctcgcttctgaatgccaatgctgtcgtagatggccttggccttggtcacgttaccctcggcggcccagccgtggatcagtgtgttggcaatgtaggcagtcatctcaactttgcgtgcaaacatgttctggacgacttcttcggtgtcggtgacacggtggttggcgaccatggattcaaagagggcttggtagaggcatggctggaggcgcacacggcggtcggagacaacggtgtcgaagactttgcgcgcgccggcgaggtcgtgcaggacgcagcccttggcgtgcactagcgaagcatagtgcacggcatccgggtggtggcctgcggccttcatggattccagcacggcttcggcggcggccatgtttactggctccagggaagcgtgtgcgtcaatgagaagcttgtaggtgtgcagggtgggttgaatgtttcgagcctgcatacgctcgtagtaggccagaactttgctgatgtcgcgcttggtgttaaggaagtactggatcatggagttgtaaggcgcgggacgcggcttgtagttgggcatggactccatctcttcgaacatctcctcggcgaagcgttcgtcgctcacacggcaaagggcattcacaatggttccgtaggtaacacttgtcgggcgcacattgttggcacgcatctcggcaaagtacgcaagacagtcgtcaatgcggcgggccttgcctagcttgccgatgagcgcgttgtacaggaaggaagtgggctccacgccttcagcaacggcacggtgaaagaccctgagggcctcggtagcctcgtcgaaggtcttggtagactccttgagcgtggtgatgtacaagccgaaagtgttggccgagggtgcggaaccgagagcgagaagctcctggtggtactgagcagccagtttgcggtcacctagggtgaggcaagcagcgaccatggcatcaagaatcgagacccagccgtatttgacaacgctgaagttcatatcgaggggaacatcggtccgtgccatactgtgaatgtcgtgagccagagtcatgcggccagccttggccgcagcggtaatcagtttagcataggtgatgtagcgtgggtgacgaccaatgcggcgcatgttgttaagacgagttagggcctcattgaggtgattctcagtgcgcccgctggtcttctcaagctcctccgcgataatggcggatccgcggaaatcggtcgcgtgagcataaggatcaaacgattcgggagccacagatggagtcgtgatcgatgtttccgccatggagacggggctttgacgatccgacgaaaggaacatctgagaaggcgaaacggaggtctgggagcctgcctccagataatcttgccacttcttgacgacatcaggacgactgacaaagagcttgccaacagcctggtcgatgaggccagtggtgtagagatccagagggagagcagaagacagagcgacgtcaagcatgtgcgcaaagcgaacgggatgagcgacatcgaacagcatggaaccgctgctgaccaacatgccagcctgaacttggagtgccagggtgaggtcagcagccttgagctgtgagatgccgatagggccaaggttggcgacagcgtgctcagcgagaggagaaactagaccaccattctctagcatggaccacaagagtgtcatggatgattgaggcgagagaaccgcggtcgattgcataaggacgcgaccaaagagatggagtgactcggtaatctgttctctgacgaggttggcgacagcagcgtgttgatcttgggtggcgttgcggatacgcttaaacatattgcgggcctggtgaagaccttcctcgacgtttccactcttgagcaaagcgaccgcatacatagctgtcggctggaccaggtccggggttgcctgacccaccgtgttcagcatgatccacaaggaacgggcagccgaaacattgccccggcggacctgaagggccagaagtgaaatggctgggttctgtcgtacgtcgggtgcggtgggcaggctatcgtaagcctcagaagcggtggggagatcgcccgcatcagccgcagcaatacagatgcgagaaatggcctgattccgggcttcatcatgcaactggttcttggcctggtccaatgccttgctgtagtctccggtgttgagcgagtgttgcacaagtgcatcttggacaatcacagcttccaccgcagaccaccggtcctggcgaccttcggttacctcgtcgaacgaagaacgaatacgatcaaggaactgcgcggcaccctcctctttgccacatgacaggtaagcacggatcacagcagcatagacctggctgtcctggcgctgtacgatactgaagacgccactgtcatcggagacagcgagccctcggtactcgttataacattcaacggcacttctgagatcaccagtggaagcaaatgcggtgatcatggacgggaagatggtagcatgtggagttattttctgtgattccatatgggcgtaaatccggatcatatcctccaccttaccttccttggcacaggcaatgataaggtgacggtacatctcgagcgggaagacaaggcgattgtgtcgtgccgtggcggtatcaaagagtttgacggcgatggacagggaagtatcctcagcgagaaggtcccgctcaagttcactcgactgaagcatgaacttgccaggctcttccataccaccgaatcgaacgcgttcctgctccaatgcctccttggccttgatcatgtcgtgagcccgggtgaccagaagctgaacaagggtctcataggtatcttcatcgggaattacccttcgacgaagcatgtcagagtagacatcgagggccttggagatagcctgagcggcatcagggtgaagacggatggcagcgagcagcagggcattatatgccccgacagtcggagtaaatccctctcggagcagagtctcaaacgcagcggggatttctgcaaatttgttggagttggccaatcgcacaatacggtccgaagcaatctggttggcttcagagacagcttccgaaacgacggcatcctcaacagcgggttcagcattcgcttctgcccccagcgcagcctcctcggcctgtgcctgctcctcctggatctgaatctcacgggccacggcctcctccacttgggcactaacatcctcgttcacggcagccttggtgggatgaggagctaaatcggacgcagcccggtcttcgtgaatattgtcagcatcctccgccgagggcttccaaccaatacggcgcttgaactcgaactgggtccaatcgctgtcatcaccggtctgctgggcgttctgccatgcggcataataggcagctagaccgagatctccatttccagatcctccttgacttgtcttggcgccagcaccggatgaactggacgcattggagaaggcattctgtaattgggttgtgcgggagaatttggcgggttgggcagcgagcgggttgaagggggttgtcgacgcgtatgactgggacgcggcgactacggattgagcatagccatgagtaaaggctttggtgaaactctggcgcgcgagatgggtgaatggtttgaagaccatttatctgataggcaacctctttattctaaagaggtaatgctggaccacagtcagtagttgtcgatgaatttcacgtgctttttcttaccttgcactcaagataatatcgaaagtgcaggttcatctgacgactgcctgtcgccaatgaacgcgcagatgcaagattaggatgatagtattaaaaggacctgttgttgacagggccagaaatttggtgaaaagagagaaaaagagagaaagagagagagaatggaagcctgaaaaataagaacgagggaggaatacgggcttctggaaggagatggagtttcacagtggaccagctggttagggccgatcttctccggagaatcctcttcatagtccgtactccgttggatctacgtagcttttgtgattgctccgccttgttcctcggatttcctacatgtctatgtatccaagtcttagatgtttgtactggtacattgatgcattgtatctggcatatcagatcttccttataccgcgggggttcccaaacgggtcgtctcgaggatacatcgactgcaagtatccagcactcccatactactccgtaagctggattcgaacagatcaggtggtaaaagtaaaagtacgcgatagacaccaatcaacatcaagatattcgcttgaaaccttggaaaaagggtccctggaagtgagtcacgttttccttccggttctttttcttctttcctttcctcggaacttccgcctcgtcttccccggccattcaccggccattcggcctcccgactggccgactcggctttaacggagaatgacgaagcggcagaataaaagtctgtaggcggtcagcctgtgatctggcttttgctttgatttgtaacctgaaaccaacccgtcgcgaacaggggtttgcctcaccctgcgctttcccacatgacatatcggctttatgattacggtctcttcgacatagtcgacgtcagttgggggtcgattggctccttgtctgggtctgaaaatgcccaaaatcggacttcttcagttgagatctcacacggatcttacccgtggcgaggcacctaccagactctggcccggttcttaatggggtattttccggagataatagcagtcctggtggaccgattttgggtgattttcaggcccaaacgaagagctaatccaccttctgaacttgtcgagtcttcctcgtggtgcttatcctttatgagttggattgagggcacttgaaggtagtccgctaagaatagtaataaagcacactgcggtacgctttgcatgaacatacttactccctaggcaccacggtgcgatatgacagtctatgtcggatgactgggatatcaacatccggtgttgttattgaagagatgccacgaggctttgcttgctttatcgaagagcatgccaacaaataaaaacgtgcctgctgatgagggttgacgacttcccatcgcggtgcgtacacttcaccttctcacactagcctgactaggatataattattacagacatcaataccatccgagcctctgtgagagagacacctcccaaaaatagccgagaaataaaaaggcacccgtggcgatccggctggatcaaacagcacttccagcgaaggctgacgtgcccaaatgctgggcacaccgactaccgaccaaattgtccggaatgatgaaatgtaattttgcaattgctaatatcgctattagatctaaccttaacatcaaataccggtgataccggccggcagatgcatcctgcaaaatcaccaatgcgttgcgagtactgcatacagatttgcagttacttggtcatttcaaccgacagtcacgagtgagagctctatctaatatgaactcgcatcattaagataaaataagctaccagatggcctctgacactgtacagacaataagaggtagatactgcattgttcgatcatgcatcttgggtatcggtcaagaaatgggcaacgccgcggtgaaagtactgctccttagtccagcggcttgatagtttgcattgtatttcttcttatcccttaaaccgcttgaattggtgtccgcctgcattctgtatcacccggccgttcagatcgctaatcaatccaggtgatgacttcttttttcatctcttcgtgcgctcgactgccaacccagctcacctatattgcgcactaatgttgctatcctcgtgcataagatgcacctaatagccgtatacagcggagaactacaagttgtagattaccagatgttcattatatatatgtgaacactgatacctagtgctaactcactgtataatgcggctcttccctaagttatgaatcgtatgttgtacgttgtacactttatttaaactgcctctagaactacgagaaaagccaatgtgatgccagtgggtcatatatgtactgacactccacatgggcgtcgatcgacatccgtgcgaatatcacaggtggagatgagtgcacagactctgcggtgcggtcaggcggtttgccaattttctcattcatccaacctagaaaatgtctggctgtgtatacctacatcgatatagcaactatggaacatcgccacatgtatctagagagcttatgcaatctccttaggccctagagaatgaaagggagtgtccccgttccccggtatttggagtatcctcatcatccgagaagtctgacagtgtcccagttgacttcgatggggcttggggatatgattgataaagtttttgcgataaatcacccattttggatccacccgccttggaccgtgtacgatttgcaatgggcgagattgccacgttcgattggaaggtttgatcggtggttactgaggcctgagttcgatacatgctagccaaggcaaatgtccctgaaggatagggcggctttggaaacttgcccggtagtcggcccaggatttgaatgttgcaagcaggttgtccgcttctattttctatttttccagtttctattgatttctattgatttgagctaagcttttaaatgtcactgccgatctggagaacctagagtaacaagtactgcctttcgcagatggtaaacgcagaagtgagggcggcatcatggatggtcagactggagacctggtacgtatctctccattcattccattcattctcgtccgcggagagactgccacgcttgtttgttgccattgtattgcgcggaatatatcttgtttactaaataggaagcatcgggctccgaggactgctctctttatgctgggtcatagtaaggcattcttgccaagcgcccatgacatcttccctgtgttgggcaccaagtcatgatcatagcaagcgctaacctcatcctcttgattattccactcagtgttgccgctaagtgaaattagagatcgctcgacgttgccaagcaagtaacaagtattggtgcgttatgcctcaggccacaaagcccgcccttgtgtcccaaatagagaaaaccgcctccttcatctcatcttccatctagctatcaaccttgctaatctcttgttcgctctcttttcgctggtcatataagcaatattctcatccatcctcgtcaaactcaagatggaggaagatttgtcctggagcggactaaacgtcgtcacgcgttggctgagattgagaagctgatcaagaaaagcccaaatctgcatattgaaccctctgaactgaaggtggccggtatttgccacattcccttgtcccttgaagggatacccaacaccatccacaattcttcatgccataccaagaagacctgccgttcccgtcgaaggaggagaacgagctgctagaacaaaagcctaacctggatttcatcatgtgggaaactcgcgctactgagtcttttcttactagcaactttggtgattgcttgtcatatgcatcggataagtacccccataatccgccaccctctggccaatatcgagagtaagttgcctctcacagctaccttgtcctgtccgctgaccgttcatgacagacttggagattatagatgttttggtcaactgctggaatgtatcgacttcaactggtacgctgtggaagcattatccacacttcaaggtcatcctgggaagtgaagcgaacggggatggtcgactgcttcgcggagaaatcatgaccatcaccggtatcatggttggtcgtttgagatccaagaggttgcgccctcatgttgttgccccggtaaggccttccataatggatggattctaaacaatctactaaccttgctctggtagatgctggtcctgtctctcatgggtcctcgtcatgccggcatcctggaggcagatttcgacggaaagattctcaacatacgcgcttctaagttgtacgatttcacgcaaaagaacaccgagttcgtgcattcgctgacgcggtattggcttggtggcgcgtgcggcaagattgagctgtgaacctcctagttcggtggtgaagttggtttatgctggacactgcaatatggtcctgtctggcaatggaaatgcagctcttaggatatgataatgaaattgctatctcgtggacgagcgtcacgacgtctacaacttaaatctctaattgagattgcatgtgggcaaaacaaatctagtgaatttgatagccaatgagaggatgcattgtatttcattctagtacggagtactccatagttccattcctactccatccagtatgggggtggtcccgccacgatggtccgcggctctgatttgtcagtcttcgatctcttatgcggaaggcattgagcctcgctatgtatggattggctatgtatggattgctgctgtaccactggctcatgtccgattagcagatcgtactatctaatagcttggaaagcaccatcgtggagcttgcgcggtgcataaagaatccacggctttgagaggttgacaaccgacataacttctagttgcattggatgaaacatgatacaaatctgaccataacattggaaacaagtgcagcgatgctcaacatagccaatgggaaacgtaccaccttgtgtggactttctcggctaaggcgacaattggagtgctgaagttcataactacttgaatatttgtcatgaaacagtaaggaacaaaaaggccaaggactttatctccccaaacagttcgactcatctagagtgggtcccgaaggaatccaccattgaattatggccaaggttcgctaactattccgtacaacatccttcgtatatgcctgtggttcgactgagccaaagccgttgtctacagccttgctaactatcggactgccatatttacttatgtgatgcaggtggtttcaattatgtagatacaaggttagttcacggaaggatctggatcgctttgaggggtctcaaagcagttagcaatacgagccccttgtataattacccctgacattgatagattgttttaggtaatatattcctagtaatacggtaatggagtaaaagatcatgcggtatatggtacataattttatggctcagaagtatgggatcaaagtatctttttatgggtaccttctgagaatcctctgatatcttttaggaagtagaatacaaaaagaatacacaacatacaacacgagattgtattgttaacaggtattaatagagtactcttgataagtactgagtactattgacagtataaccttggaacaagcgctgatatcacgtgccagcactaggtgcgtgcataagtcgtgggtccacccacacgggtcatggtgggaatcaatgggccgtggacacccgtcacctgtggccgaaaaaggcagctccggaaaacgaaattcaggcagatttctccaactgttcttgagaaacctgaaatgcttatttgatcgacacaggtagccctcaactgctcaccttctttttcatagaggttgatctgattcatcttttcccccacttggtcttggtgtctggccatactcccgtacacagtactttgttatccaccaggcactaacgccaacggtgcatgcaggtggcttgaactatgacgtgagagtaatttcaaggtcatatttatgactcacaccatagacttgcccaggtgcatattctaaaaaccctgctttatgctacctgagctcgacataaagataccctagtaatctttcggctgaaccggagatagaagcaatgccaagggctctttataggagcataatactcgatttggagcccacgtgacccggaaatacgggaatcggtagggtctcggagttgagttttcgcccggacgatccatgtgggtcgccaatatatcaagtccctcataatctgttcaatcagctctcatcatctgctttagggttatttacttgaccttttgcttggattggtatgtagaccaaaagaaaaaaaaaagaatagaggaatagaaaaacaaaagcttctcgaaggttgccaatccgtctcaccaagttctggatcacttgaaacgactcgggaggaagttccggaaccgtgggtgtttcgacggttaatagggaagcttaaggtcttcggagattagggtctaggccgctgtaatgatgcactacgtctatatttttctttgtatacttcgtattgtatatctgacatcccacattgggtgatcaacatgtacgatgatgttggctagtcgattattatcatgtatctagatacccatatagaatacagtattcaaactatagaagtgggcctccagggctagatcggcgtttccatgacgatactcatttccttttaaggacccgcgtcatccatgcctgggcatgtcgtagtcgcgtgcaacggccctccttcacctcctccgccacaattggattttggaattcggagcgagaacggaaagccctagagaaggatggcaaaaaaagtgaagcaattgggaatgatggttcttggttatccgaatgaaaatttttgttcttcgggtctctgccgtcttaaacgggatcaaaccattattattgccgggataaccggtaagagcttcctcgtctggtgacgaaatccactatgtggctactggccatacagctgtctcggcgaatgatttttcaatgaataaagggagtgactgtggctcggagccgtagtgcttataaatctcgccagatcccctacagggctgtagccgctggttacttactacacataccccctttcccccaacctcacctaatatatacctcttttttatataataatagcttgtacaaagctctgctatcatgacgcaaacactcctggacacaccgcgccatcccgggcgcagcgaacgaggctcggagagtgatagctcgctcgacgaggtcgcgcaggagaagcagaatgcgctggtggccacactcggccatcatggcaaggacctcgacaattcggcatccccgaagcggtggaagagtttctggacggcattccgacacctgtcgcacttgaccccgaaacaagttgacgatttcatggcgtcatacgtcatctataaccttgactggtccgacgagaagcaaatgaccgaggctctgggccccaattaccaagaaaaggtcggtgattgcttgaagtcctattacggagtcctgaaccacctttgcgcactgggcgatgtcgagaaaatgtacatcccaccgtggatgagccccaagtctagcgtgctcgagaatcagatcctgtacgagcgctcaatcgcgcacgacatcggcttgaggacaggaatgaaggtgttggatctgggctgcggccgcgggcgcgtcgccgcccacatggcgcaacacaccggcgcccaggtaacgggcctcaacattgacccgaaccaggtcgagcaggccgcggccttcaatcaggagcgcggactccagaataatttcgtcacccaagatttcaacgacctccccctgcctttcgccgacgagagcttcgatgccttctaccagatccaagcactgagtctgtgcaaggacctgcccgccctgttccgcgaggtgttccgtgtcgtcaagccgggctcgaagatctccctgttggactggatcagcctgccggcttacgatcctagtaacccggaacacgcggagctcatgcgccgcgtcaagccgctcatcggcgcggtcggtacacccacgcaggagactctcgaggcggcgttgaaggaggctgggtttgaggtcgtgcggtccgagaacgctagtatcgatggtctccaggccccgcttatcgataccgtcgatgtatacttccgcaccctccgccaggcgatccttgcgctcgtcaaggtgcatgtgctgccgcgccacttcaagaccttgattaaccgtctctgtttggatggacaggctttcgtcaagatggatcgcatgcgtctggccacaacgagttatagtatcattgcccagaagcccaaggcataggccccggacaagttctctcggccatactcgagatgtgaggaagttggatgggaatgaataattttccttctcatcaaactctgcggcgatcaagtcgggccaattatccagagcacatccccctcccaccgccaccgccaacgtcatcgtcgctcctcacatctcgattggacatctcgacacaaaataccctgtacatttataatcaacggattagaaggctgggggatttgacgcatggaggagtttcggttatttatctcatttatttatttttgatttttcagaggggtttcttgagcaataaggagtttatgaagggaattgcatctacatcgggatagcagtacatgtatgtacatcaaatatatcttgttccgagtaaatatctgcgacgataagtagttacacattaaggaaggccgaacaaaattataataaaaagtttcaagtcgggattcaatctatgaaaccaaaaaaaaaaaaacaagcaaaaagaaaaggtcgtgcccgggatcgaaccgggattgctggtatcagaaaccagagtgatagccattacactacacaacctgattgatgtgaacagccacttcttttagtatcaagagactattttcatgttttctatggacacttttgtcaggtcctgcaacatccccactagtccctattaggataattccatacacccttgtaactctagaatctggaaaatgttcacgtctcgtataagctgcatctgcatggcagcgtaagcccagcacaccttatccgcgctattacaacctactcctcccccccccaaccaccccgtgaccgcggggcagtccttccataatctccaagcgccccgtagatcccggcatttttctcccccacaacaacaacaatcatatctccaacctaccagtactcgatgtctcctctaccgccttccgtcacggcactgtctgcgccgggcaaggttctcctaaccgggggctatctcgtgctggaccgcggctacacgggcaccgtgtttgcgctcgatgcccgcatccatgttattgtccagcagctgaggaggggtcaccgccgcggggtatcgggatccgagcctgctccgggcgtcgaggcgctatccaattcgggcgttgaggaccaggacggggaggataccattgttgtccgttccccacagtttgtcgatgcggtgtgggaatatggtgtgcagcgatgtgggaatggtgggggtgtcaaggttctccaaaagggagatgggtatgcttggctgtcgctgtttgcgcgaaaacatcaattgactaattccaccttgcttctctctaggccgcgaaacccctttgtcgagacctctctcagctatgcattgacttatatcagctacgttgctgactctaaggacttcgggtccctgtctgtcaccatcatggctgacagcgactactactcggaaaccgctacctccaggggcccggcgtcgcagggacgtagtgggcggtttgtcaatttcggcgttcctctttttgaagcccacaagacaggactgggctcttcggctgctctcgttactgcgcttgtctctgccttggtcattcaccgtaccatgcagccggaggatctcggtactggccgggataaacttcataacctcgctcaagcggcccattgcgcagcccagggtaaggtcggatctggattcgacgttgctagcgctgtctacggttcgtgcctctaccgacgcttctcgccgtcaatcttggaatctctcggcgatgtaggctcggctgggttcgaggagcgtctgttccccatcgtggaggactctgatcccgagcatccatgggacaccgagtgtgttgactttggcatgcagctcccccgtgggatgcagctggttctgtgcgacgtggactgtggctctcagacgccttcgatggttaagaaggttctcgaatggcggaataacaaccgcaaggaagcggacgttctctgggctagcctccagaataacaatgagcgactgcgtcaagagctcaagcaccaggcccaacaccccgatgccaatcccgaaggcgacttttctgatattcgcacccttattcagcgaacacgccagcatattcgcacattgacccgccggacgggcgtcccaattgaacccagtgtgcagaccgagctgttagacagtgtttcagagatcgaaggtgtcattggcggtgtcgtgccgggggctggaggatacgatgccatcgcgctcctgatccaggatgatcccactgtgatcgtgcgtctgagagatcatcttgcgaactggacgagcacgatcgaggatgactttggaggcaagatcggtaacgtacgactgctaggcgtccagcatggatccgaaggtgcgaaaaacgaaatgctggagcagtatgctggttgggtctagcttgctctgctctattaaaacaaggcaactggtgtcccagcccaccatgacttatcaacgtgtttcggctaccagcttagccttttctcccctattgcatcctgggccggaccctccagaaaatacacaggcctgtaggataattaattgcacgaaacacagctgaaacatcgactttgactcgggtgttcctatattccacctcccctaccactccatcagtgcccacctatctgcgtctctatcttcagaatcatccccctgcatatgcactacgaatcccatgcgtggccgaggattgcccgttctttttttttttcccccgacgttcccctatgtgcgaccaggtctgtttgccaggtatttcaatatagcctggactcctctcaaggaaacgacctctacaggctaatattcttcggctctatgatacctagtatgtgagatagaatatacatagaatccacttgcacttgcattttatggtgacagtgaaacaatgaaacaatgaaacagtgataactgcatgtatactccgtattatagtcatgagatccctaatcgtcgtacagagagtacaaagctacacatgtggagaaagcgacctgtcttgtccatgcaactatccagagatgtccagatctacatcgtatcaacgatatagcatacaagactcttggcctaactaatttccccggatcttcaattgctattcgctatttactcttataataataccatagaactaaagtactaaaatactagattatgggcatgttttatttttctttgactcaaaaataggggaaacattttgcgtgcagttagggtcaagaagcctattaggcctgcagatccccttttgccttctttccttctcttcaaccaattcaaataatacaatcgaatatcatttgggggggtacatatacgtacagccactccatccacactagttgaggtattatcgcgcctcccgcttagtcttgagtcttgactcctcacatctgcactgcatctctctccctctgtctcctctcattccagctctcacagactaccacttttcacccaaacattctcccgttgacagtgccccctttcctaacggggtaaagtcaatcctcatccgccatcggggcatcctaaaatgtccacaaccgatcacccggagtcgggggccaacaccaacagagatatcaaccaacccccaaccacaacaccgcaggaccaacaacagacctcaccgaccacagagctccaagcccagacagaccttgccgctgatacatccatcccatccgcccatgaccaaacacccatgaaccagatccagatccaccccgcgactggccctggtggcgaaagcgaattcgcccccgagacaacatcaccgaccaccaacccttctcaaactttcgataacgaacctgctgtcgcgctggcaaaactgactacatcaccttcaatggataccgacgagcgaaagaacgcgcccgagacttcgaccgagcactccgatgatggctccgggaaggaagtcgaggaggatgatgctggcccggcgctggtgatcacgctgctgttgacaacggggtcgcgacatccgtttactatcgatggaaactatctcaggaagcgatcggtgaatgttgagaactttgatccgttcttgatgagcgtctacacgctaaaggagttgatctggcgcgaatggagacctggtaagagttcgacccagacccagacccagacccagacccagacatctacatggacattggatgggcaggatccatcctgatgtgggatgtcatggaacgagagtagctaagctaacattgttgttgatgcagattgggagacccgtccctcgtcaccgagctctatccgtcttatttcgttcgggaagttgttagatgataaatcgcctatctctggtatgttttttttccctccttgtggttgcatggttgctatggctatagactttgatactaacaaagcgactagactccaagttcagcaaggaacatccaaacgtcatccatatgaccgtcaagccgcaagaagtcgtcgacgatgaagatgcaaagggaaccaagacacaatacagccgggagcgcgaagcaagtgagcgcagccctggatgccgatgcgtgatccaataatctcgctgcccgatctacgagtatcaggtgtcgacggcatgcttccagcagtgttgtctgctgcttactacttccaccctgacacccaaccttcccttccttgtccgtcttccgacaatcctccaccctcaatctacctgtcattgcagtgatacgcctaattctgcctggacgcaggatcaacatccctgttttgccgagccaacatgggcactctggaaacggcgtttcgacatttatttcttctgaccggatcctaggaccatgatttcgaccggtttttctcatatctcttatttctgtgccatgttcgagccgtttccctgttctctcatcgccatatcatctgcatgcgggcctcatttatctctccatggatcttctctggagtgcttcgatgtcttctcttcgacatgtcttccgagggctcgttctgagattcattctttgcttttcgcattgctgtcaccattattcttaccccgatttctcgatatataccccctccgatccgacttccctttctctttgtgctctatcattttctctgtatggttccttttcttatggcctttcgtgtacttacgactttgtccccctcctttgtcctccttatccttccttttctcgcttttcattccttttgcttgctttttctaactgccttaaggtggttagtcgtagtgtatagggtgtttttggaggaggctgacatgtttctttgtcttatatttaataacttctaaagtgcctatatatctccgcgggcttagtgggaattgctagtcaattcgaggcagacgatcaatccggagtagtacgttgttcatgcatagtttagaaatctctataatataacggctggaagtggtcctgcaagactgcgtggtagagatagaccatggattaattcaatatatcgagagtaatacattgccttgataacagacagcagacacatcggaaatgtatcaagccaagtgatctctcattctatttgacgacataaggtaggaaggagtatgacgagggacgcaagaggagaatagtagaacacatcgacatagaagagaagccaaaagaacaccatatcatcaaagccattagaaatccatcttgagtctcttctccatctcatcatggaaagcaggcggctcacggaggtcatcacctaaaccaaccaggtcagccaaaacacatccaaaccaaaaccaaaacaccagataagaacctaacataccgtggtaaatatcctcccactgaacctcactatcccgacctccaataacaagaatatcctcatgaacatttccaccccgcacaccgccaagcacagcaggccggaaagtcccatcgcgaacgatcttcagctccatcccgcgacgaacaggctccgcaatcccgtacgcccgacgcagtccctccatcttcaaggcgtcctgtgttgcccgccacgagataagtcgtgcctcgagcgggtgcgtagatgtgggaacatcgccgctggagttcgtggacgacgcgtgcgcggtggcggcctgcgtgagcttgttgcggagcgtatcagggagtcccggggcggagggcgcgcctttagatgggcggggtgcttggaggcctgcttgttgccgggttgtgaggttgctggtttgtgttgcgttgccgcttgggggggcgatgcggaggaactggggtttgtgttagttttgtgtgtttagaattgggatggggtttgattgagaggttcgagatggagtttggtgatggtggtgttgggaaggtgttctagatgcttgcttatgggctggactccagggtgaggttccgggtccgtagcttgataacgtaccatgatggattgataatgctaggtttttgggttcaagactcgaaatcacagattggataagtgtaggtctgtatttaaagctcaaaaaggagatagaaaagtagaaacaagagcaaagggagggtggaagatgacaagcaacgatgatgcttaggcagagagaagcagcgcggccagctcctacgacagacgagagaaaccaactacgcaacaccccaattcaaatcacgtgccctccacttccgccggcaacaattctatcgcgacattctcgacctagcgaaaggggagacaatttgcacgcattacaccacccaaaatgtcccaattactctccccaatagcccgtcgggccctacggactctgacccaccgtcctgcggtctcctcgcccctctgccgcaccctcaccacatcacccgccatctccttcgcctcgaaacaatctcccatcacctcccgcctcaacttccaccccgtcttccgtacagccgccgtcggtttctccgccgtgccaaagcggcaattctccagctcgcctatcatccgcgctacatacaaccaggtccggcgcggtatccgcactggacagcaggctcgccgcggtaaatcgcctgcactgaagggtacgcctgggttgaagggtgtttgtcttaagactggtgttaccaagccgaagaagcctaactctggcgagaggaaggttgcaagagtgcggttgagttctgggaaggttattactgcttatattcctggtgaaggtaagatttatttgcactcgaattggtgttggaataggattctgtagactctgttccagtgctggtttttcctacggggctttttggctaatttttttgtacaggccacaatatccagcagcatagtgttgtccaggtccgtggcggacgtgctcaggattgtcctggtgtgaagtatacccttgttcgtggtgcgatggatttggtaagtcactttttgcttctgtttctatatacctacttcccgggtgtatgtctttctagattttttactgattatactttactagggtggtgttggaagccgtatgacgagtcgctcgaagtacggtgcgaagaagccgaagaccgactaagatggatttggggatgcaggttgatcgtgatcgacctgttgtgagattatacaatattggccttgtttcatcagctgctgtataagagactgggctactggattttgggtttttatgctcttcggagagcaaactctttctgttcatatttgcatgtaacaatacggattgcgactgtttatttgcatattatctgtttcgacgttcaagctcttcaagtcaattttattgaaatagaagtataggaaatggttccggcaatatcactttactccggacccatgcaacgaaacaaaccccaaaaaaggatgaacgctcgaaaccccatagtaacacatgtcagacatcgaagtaaacctcctgggcgtaacgcgataatgggaatcaaaatgaaacagttaaaaacgtaaacctgcagccttttgcccaagcgcggtaagatcgaacagcatattgcttcatctaggtgtgatatccaacccgagtagagtagcgggtggacagagatttcaccgagtttttgtagttgcggcgcaaatgggtgacactatcagccccccaaatgcgcagcgcttcatctcaagatgatgacaaccgacccgcgcattgtcgctaaaaaggaacgactgggctatccgtgagtagacccagacggatggtgaacatagtaaaatcagtcgtatttcttgtcccatccgttcggcttctccatcttgttgatatcgaaccaacgcttggtgcctgtatcagaattagttttgcactagaagtatagattggagggtcatggacatacaagagtaatccttccagtcgaagttatctttcggttggcaggaacatctcaagtccaggcgtttcttttcatccgaggggcaatgtgtgaatgggacatggtagtaggcgatgtcatcccagaaatggatttcctccttctttaacatcagagaagcggcgatagagtgaaccggcgcatcgccccaccgctcatagaagaaaccaccgtccttgtccaaagacgtgaaatagtcaatatatgcgtcggatcgcagccactccaagctgccaatctcaaagttcgaccactgccagaaaagttaggtctgttggagattaactcaatttcaatcacttacaaagtggcagttgttgtagctttctccatcgtcgttgctgatgaattccatagcatttccctctgagacatactcggggtgactacctgtgaacttcttcacgctatcccacagggtaggaatggtcgccacatactcgaagagactgatgacaaaactatacttcttgttgttctccttcataaagcggaacggatcggagtcgacatcacagtagagctcaatgctaggctcgacgcgccagtagtacccatagttcatcataagcgggtggcggaagaagaacccagactcataacggcacatatggcggtaactctcggaaccgccgtaaatgatcttcttgcggtccatctcctgtcgcgcttcttgggccttgtcctgatcgatccactctgggtatgaccagtgttccttggggatgacaccatagtgagttttgccagagaccaatgcagtggtcaatttcttgaactcgtcatcgaactcgtggtcgttcaggaacacccaatcatagttgtagttgtggttgaaacggtcctcgactgttcgaatggacttgaccatgtcccaaaggtcggagttgcgcgcgagggtgacaaaagtggcatttacccgttcgccccggtgtgaaccgataacttgcggtttttgcgacttgactgagtcgtatgtgggattcttgggtgtaggggtggttattccggttgtaggaatcgagatggaggattgtgagatgaagaagaagaccaccaatgcctacccaacattagcaacggatattcataaatatgaaagaaagacttaccacgacggcaaagattaaataccgcgcatatcgaatagtgacggacatgatgatgtggggggggggagaacaaggatgattccccgttaagtggcaaggcaacaatagatatcagaccggtgcagttggaaccaatccaatttagaaagcgagcgacatcaatggagaatgggagagaagcaaaaatgaaaagccgccactggaaatcccgaagatgtttagggggggccagaggagattaaaggtggaaaagatgaaaggccgcgcaagacaatgacaaccgctttcagccactttgggtgtcacccaatttgagacattctagtgctcaggggatattattagggtacgggggtgggtttgtaagatccatctccattcgatcttaggggcgatgtcacatccacttataaaagagacataaaagggaaaggattctcgttgctatatgattttaggatgatatctctgtctttggttgttaaccagtgttattgttactatccgagtatatacactaagtacgtagagggccaagtgtatccccgtatactccaaagcctcatatagctctataacatctcatctccgccgaatccttgatctttctttatatatcaatgttcaaagctgcacatcaaatagacgatcgacgagttgtggcttggcaaaaagagcagcctttctgcctgaggcatccgcactccagaacttcccgttcatcgatcgcacctttcctcactaccccccactaagctattcacctccccacctctttcctatccttcctcattcagaggatggctttcttcggatttgatacaaccctgcccagggaccgtgatggttccggggccaaggggttcttcgaaaacccagatccctttgccgatattgctcgagctaatgcgctaggagatgacgacgtgtgagcttatctttttttaatggggaacgggccattatacttatcatcatttaggatcgacttcgaggatacctacgatggcctcggggatcagcttcccgacgaccaggacgagttcaacgatgacacgtttggcgaagctggccccagtacatccattggcagagactttgatttcttcggaaagaccgctcaggtttccgacgccattggcgaggaacaggttcgattcagtctacaaaaccccaatgtaggccgagtcgctccccagcccgctcaaattcctgttcagccggccgccacccagactaccaagcgctcaggctatgagaagtattcggatcccggctatattccagacttgcaagccaaatctagtgtatggggtgtctcgcagaagaaaactgaacccgctgccgctgctgctgccccgagccggaagatgatgagcttggaggaagtcgaggcacagatgcgttatcatggccataataccgcgacccccgccgcagaggcctttctgcgatccatggtggagcagcctcagtacccacctcagctccagcacctccagacgcttcctgatgggttccctccggtgcctccagagttccttcaggcacagatgaaacagggccacctacccccacaaatgccacacccaccgcctggtatgccggagctctatggtggccctggaaacatgccacccggtgggccgttgcatatgatgcagaacgtcaatctacccccgcaaaacatgccgcctcttggcccgcgccacggtgtcccaccgcaggcccaggcccagcgccctcagcaacctcttcaccatcagcaaggcccggcgccaagccgcggttccaacaatggcatgccggtaatcactaacccgcaacaactcatgcatctcacagaagagcagcgtaacacttatttggtggaggatgctaagcgggcaaagcgcaaccacaagatcttcctactgtcccgaggcaacggtctgatgaccccgcaggacaagaatttcatcacccgtatccagttgcaacagctggtcgcggctgctggaaatgtcgcagattcagatccggaggccgtgctagcggaggacttctactaccaagtctacagccagatccgtggcgcaccgcgccaacacccacaccagcctcttggtcacttcgcccagacttatctgctccagacaggtaaccggctcggcgggcatcggcggggcaatttccagagtgccgacaaccacatgcagcgaatgcagcagcaggtccagcgtgccgtagaggcggcaaaggccaagcccaagaataagcagctcatcatcgagggcagcttgggcaagatctcatttagcaatgccaaggcgcctaagcctatgctcaacattaagcgccctgctagctcggagggacctaagcccaagaagcagtcggatctgagtctcagcgatcgcaagtcgatccttacgaatctcgaaggtgtttacagtgcattgatggcaatggaagatatggagcgcacgatgccgccaccccctgaggaaggcgatgccgaggcaatccaggaacacatggaatggagacagaagcttcattcgcttaatcagaagttgtggcggtcattgaaggtgatggaacccattgtgcccaactcgacgacaccacacccctttatcgcattcttgtcataccccaagggcaagaaggccattcctcgcatcttccgtcacattgatcaggaacagcgtgtcactatcctcaccatgattgtcgtccacctggatagcctggatgtggtacgtcttgctcaacccgtgccgggcgaggcccagccaccactcggtgtgcgcgaggccattgacctgttctcactggctgtcatgccctgtcttttgggatacgtgaacgaggcgccattcaacatcattattggtcttttgggattggtcatcaaccaaacccacgtgcagactgtggctcgcaccaaggttggcttggggatcttgaccatgttgctcagtcgtgccgagatcgtcaaggaggccggtcaggcttccgagcatgattggcagcagtgggtcgagaagttcaacgtgctgtttgacactttagaactcggattaaatgacattttccctggatcgattagctccggcgacgatatgtatgtgtggcagttccttgctgccgtgggcattggcgccagtcctgagcagcagcagcgcctggttattgccgttaagtgagtgtttccgtttcgatcctagtgcagaggaacaatgctaatccatttgttacagggaccgtgtcatggaaacagtgggatacagcaagacccttcctgccgatatgggcagtcaacgtctgaacaacgtcaacctcttcatgcgggctattggtctggacgttgagctcctgggttagaaaggctattctatttctgagcctccatgggtatatacccttggcatgttagacaccacttctgtgccagctcgtccagacttggatgaatgagcatgagccccgaggccccgaggcattgattactcgatggtctcacggggcaatgttgctgaaatgcaacacactatctaccacatctccagggaatccggggccctggcaaaaatcaggttgcattaatgtgcctgaacccggtttattttacttttttccccaataccaatttcacttcaatgttctatatttaatgaacacagtaaataagattttgccgagagttccccgggaacggactgccccttgcatatgtccctattcggcagggttgagccgacgttgtttgcaggcaatccgggagtttcagggaaatttcggggattttccagggatcttctctttgcatcttcccacatctctgcccggctttgcatatccttgcatatccttgcccgtttcgagactcagggctgttttcaccgccacgctcgccatcattacacatacttgatgtacataatgttcgcgtcaacaatgataacctcacttggaagcgaaagggaaattagaggtgcaaacatgtagatcagtgggcgaaaatgtaaataaatgtaaaacaagatgaatatcaaaccaccaggccgcatcatcgcagatccacgtggtgagggccatcccgcccttcaatttccccttaaaaagctgcccctcgtccgcattctactccgtactctccccgtactcttccccatctccctaccatcaattattacacggaatttaatcatgtctgctggttctgttcttgttgctgggtaagtggttgaattacctatttgggatcttatagtgagctaattccccgcaagtggcacgggctacattggctcgttcaccaccctggccctccttgaggctggctacaaggtcgtcgttgccgacaacctgtacaactcttcagtcgaggccctccaccgtattgagctgatctgcggcaagaaggccgagttcatcaagctcgatgtcaccgtggagaacagcttcgaccaagtgttcgaagctcaccccgacattgacagcgttatccacttcgctgccctgaaggtgtgtacccgatgaattaagaaagcataaatcgtatacccttcgatccagtagctgatccaattgtctttatccaggccgttggcgagtctggcgagaagcccctggactactggctggtcaacgtctacggcaccatcaacctcctgcgctccatggtgaagcacaatgttaccaacattgtcttctccagctccgccaccgtctacggcgatgccacccgcttccccaacatgatccccatccctgaggactgccctctaggccctaccaacccctacggcaacaccaagttcgccgtcgagaccgccatcactgacgcgatcaacgcccagcgcaacaatgccatcaaggcaggtaacgaggctgaggccaagaagtggaacggtgctctgctccgctacttcaaccctgccggtgctcaccccagcggtattatgggcgaggacccccagggtgtcccctacaacctgctccccctgcttgcccaggtcgctactggcaagcgcgagaagttgatggtctttggtgatggtatgcaagccccttcttcccattattgacactccctgatctaacaccatcatagactacgcctcgcacgacggtaccgccatccgcgattacattcacatcctagatctcgcagatggccacctcaaggccctgaaatacctgcgtgccaacaaccccggtgtgcgcgcttggaacttgggtaccggcaagggcagcactgtctacgagatgatccgcgccttctccaccgctgtcggaaaggaccagccctacgaggttgctccccgtcgcgctggtgatgtcctcaacctcactgccaaccccacccgcgcccacaccgagcttggctggaaggctgaacgtaccctcgagcaggcttgcgaggatctctggctctggactaagaacaaccccgagggttaccgccaggagccccctgctgagctgctcgctcagcttaagaagtgaatttagttcgggtactgatgtagcacacgtgaattgtggtttgtaatgatcttgtctttgttgatatagaagtcgtggatcttgttgttagtatacatgaaacgaatttcctttttgtgatgattggtctataaatttgagcctattctctgttcacggtagaatgtagcccttaactccgtctatatatcacaccatacctataaaacaggtatacacatatctcactcatttctgagctttgcgactcctcctcgacccatcagccttcttccccttcttctcggccgcctccttcttcgccttctcagcctcagccttctgcttctcaacctcagcttccttcttctcaaaagcccttataacagcactctgcttctccgcctcctcgaccatcttctcactgaaaacccatagcttcttcccaacctcatcattgcgcacatccacccgcgcataatccatctcccgacactccttaatgaaccacccacccacaccccgcccatactgctgctccatcgccgcatacagaatactctgcgcaccctgaacaggcgacttgagcagcagccaccagagaggccaagtgagcaagtacagccaaagaccccacaacgacccaccagtcaaccagcgccgcatgcccggagtccgcgtcaccccagggtcaacaacgatgacccgcgtacacggcggcagactatccggcctctcgtaagcattcaaatgccgctggaacgagtgcgcgaagatattcagcgcaagcttgctgagcgcgtacacgcccttgggctgcgcgtacagcgccggagacgtcttcgtgcgcttcgataccaccttctgcttcccgcgcgccatggagtccaggtttttcaagtcaccgccgatatagccggagcatgttgcgaagatgacgcgcacgtcgcggtgtgcgggctgcgcgcggagggctgggctgaggatgctaaggaggtggaagtttgcgaggtagtttgtttgccattctaggtcaataccgtctattgttaggggacggggtttggagggctcgactgttccgccggcgaggattatgcagtctagtcgacggggtgggatgttgtcgatccattttgttgcgaagaggcggattgagtgcagggaggagaggtcgacttgttcggcgtagatgagagggttttttgtgctggtgcggaggtcgtcgatatattcggagagatagaggtcggagggtggttggcgggttaggaggattacttgggcgccgcgagttgcgagcccgaggactacttctgcgcctatcccggaggtgcccccctggatttggtttttgtcagcttggttgattgggtagtgatgtggtgctggaggggtgttcttaccgttaccattatcacttttgatcgcatcattcgctcggagctgttgcgggctccttcaaaatagtatttcagcgccgcgagggctagcacccatggtgctatgcggaggattgtccaagcatacgggatggatgagacaccatcccgcaggccctgggcaatgatagggatgggcataattaattgagaaatgaagatgggaagagagaggacaggtgtgtgtctcctaagggatttctccaatgtacacgtatctccgcttatcttattccttatcgccaccctctaattccgctccgcccctcaaccctctttcttccttctttctttgccttgacagctctacaagtaccaaccatggcctctgaggacgaagactatttcctcccaccggagcagcagcgccccttcagctccggaatccgccgcaaacgcgtgcagttcgtgcgctcgtccaatctagacaccacaacagccccaactccctctctctccgggactagcatcgcagacacatacctctctattgtgatgggccaatcagccccaagtacatcaacacatacaccaactcagcgcgcagaatcaccaccaattcgtacgcagtccgcaccgccaacttcagacatattcccgcctccatccacagtggcgcccgcggcccaagaatactgtgacgtgtgccagctacctctcccaccacaagccccagcggacacaacagaccaaaaacttcgcccgcacgaagcctccctcgcgcatcaaatctgcctcgctcactctcacccgccatcgcacctcgaccgcacgcgcacaggtctccgatatctctctacatacggttgggatcctgatagtaggcttgggctcggcgcttcgggtcgtgagggtattcgtgaacctatcaaacctcgcgtcaagcatggtacggctgggttgggaactgggcttgatcaggatggagatccgctgccgcctagaccggcgccgccggtgaaggtgcagaagcttaattccaaacaggcgcggaataaagccgcggaagataagaagagggcggaaaggctgaggaaggctttttatcagagtgatgaggttttacactatcttggggaggggatttaggtcgtggattttatggatggaggagagttggataccctcattttgtttgttttttgtgcttgatgatacccctattgttatttgttattctttaaatgggtagcgattagaacccaaaaacgctgtcaaactatattcaattacaaaagtaagctttgtcaatcaaagcgttactttatataaaatcaagaagccctccgagcccgcttaattgagcgatcaactaggttttcaaagcctactagatcactatacaatccgccgcttttctcgagaaagaagtaagcgaattacgcaccgccaataagaagcagaagcactagatcccggaggcagatacccgccgaagaagctctctcagtctcagaagcctctatattaattatacagcaataggaagcaattgaggcacctgcctccagtcccggtacaacttaggaaacgagatacatagagatagaactagagatagcccaaaaatgacatgcgttccttgggaaaccatgccgaattaaccactgccagtgaaatccatttgcccaatctgccattcatccaataaatcaaatcctagaaaatcatcatagagcaacggattattctcatactgctctacctgtgtatgcagcgaagcgtctgcatccaccatggtgttatcttgtacttgaccgacactgttgggtggaatcaagtacagatttttcttggcaagaatctcctcgaataatggcagggctcgtttcagggctggtatttcttttccctgtgtgagaacaagcattgtctggctaatagagatttgggccatcgaacgaacgagatctgtctcggctgtatcgagggccgattcgatgtgtagagcgagcagtgcaattattgtggttatactggtaagtctatcgttagatatccatatttttgcgctctgtagatcgggaaatggggaaaagagaatggacggcacatacaaagatatgggaaagtcctggagggtaccactcgccagaacccttttggtaattgtgtccaactccaaaatagcagaccgaagccgctgtttgacccactcgctccagtccgcatgatgggtctgctgccaacaacgtcgtatcaatcgacacaagatgcattcaaatctgtagcccatggcttgcatagccagatagtacacatcggttccaatgttctcattcatatgcatcttgacagggagtgatttgcgccatgaatcaagcgagtgaaacatctggcggggatcttgctgtggcttggttgtcacgttggacaaacactgtccgactaaataagagtcagccatgcttgtggtttcagttatgggttgatgataagaaggatagagcgtaacaacaaagaatcgaataaaaccagcacctacatattcgagacaactcgcattgaacaacaggcaaggccctttgttgaggcgtgactggtgatagcaagtcagatgatacttccgagctaatctccacttcccagtcatcttccgtcctcagtctgatcgtggaggtagtcgcgagtagtcgcgagcgtctagtattgacagagacatgaaaaatgtctaaagtctacgtagctacagtaaacataatgcaggaagaacagaacatagtgacgagaagaaggacgtacgtagagagcccaccagatccttctatacaacttgaagactgtaccaggtttgtcttctcgagcacacctgtggaaaaatccgtaggcagttaatacccgcaatactcattccaggtgctatagtccaggagtaggaaacgtacacgttgcgtatgtcaagcttagtggcaagacggattgcgttgtggaaccagtagccaaagtctcggtcggtagggtggtcgagaatcaccatgcacaagatgatggatccctgcagcatcaacaatgggtcatcttcagcggaaaagtcgtgaagcagcttggccttggagaaaaacaactcttgcgcggccgagcggctagcaaagccgcaggcggatagcacgtctgctggcgcatggacactggccggtgccaatatgacgtatagcaagaacaatgagcagtggccagattgatagccgcggataaaatcaactctattgatcaccggagcaaaggggtagacgtggtcaaagtatgtcttaacgagggaatctctgttatgatttgtcagtgagtagaggcaaatgcgaaaccccgaataagatggaggattataagcttggtctcacaggtagcgtgaaggaggtagatcaaatacccccttcttggcaagaaattcgttgtcaatgtcgtccaattgaggttgcttggcccatcgacaattccgagtactaaaactatattccgggcttgggcggtagggagtgctgaaaatggggtggtgtcgactagattgtgtagtcttttccccggcgtcgtttaagatattgagatagaacagatctagctcagcctgacgtgggctttggccatccagatcggaagtcgaaggctgggccgactgttcgagtgattagattgattagatcgattagatcgattgagattttgaattggaacactgtcaatcatctaaaacatactcgtacatgatcagggatcggtgaaacatggtttaatttccttggagcccatccaagttagcacgcgcctaaaagctactaggataaaccatgagccatcctatcattaatcaactcacctagcacgacccttacggaccggtagtacacagtccttgacacactgcctgctggtacaacagctgcaggggaggccaatctcggcggcatcgcatttggtcttgcgtgcacggcagggcacacatgccttattggctttgagggcacgctttccggcttgtccggacaccgcggttggcttggccccagaaggattcatccgggagaagtgtgtttgttgcagcctcggaattgcacggacggggtaagctttgttttaagtctttcgaggctcggtgattcaagttccggtccgatcggggactcacataatccttgaattcagccatggaggccccccatttatattcccggttcccggccgcttcgtacatgtaaggagtttctatgctacattatagatttattgaaataatcctgctgtacaattaagtttatgttgccatccaagctgatttgggggcgtagcagatcccccgctatttaatgtgatctaaacagtctcttcaaccttactctctagcccatttggctcacctacaatcatggcgccttgccgacggctcatcgtctccagcaccttagctgcttcgagggaatacttgcacttgctgcgtatctgcgggccgtacttgtagaaaagaaacgggaaaggcacgcacgcaagaactaggaatgcaggaatggagctcgcccattgatttccgagcttctcgtacatttgggtggtaaacaacggaaacgcagtgccgaacaaggaccgaaccactgagttggctgccataacagaagcagcatagacggtatctttacgcaggtgagcaagtgcattgttgcataaggtcacggagtaacgatcaaaacttacaagagtcgatcaggtagctcatcagcgagatgaagaccatgacgagtccgcacgagaagaacacggcaccgataatgggtacaatccagtgcaccgatggatacgtcgtccaggcaaacatgaacaatccaatcggaaccacgaaagagcctaccatagccgtactcagtctggcttctggctcgactgtgcctcctcctgcgtcgatctccttgcaaagacgcacatagcgtttgttgtctacgccggccgccagcgtggcaagacagacgccaatggcgacgccgataaacggaagtccggcgatgccctggctccagcctcgagtatattggaagacgataggaaacccggcaaaaaacatgtaaagtgtgccatagatgatggcgacgtacagcgacgtcagcaagacaatgggctcgcggaacaacaagatccaggggcgcgtgagagagatcaatagctcctgcgagaaggtcttgggcggctttcccgcattgatcctagacacatatactcgtcctgtcacccgggaaagggcttcggctcgacgttggagaattaacggtgcgtatgtttcgggggtgatcagcatcgtgataatcgagaccacgcctgccattatagcgattaacccgagaggccagcgccaaccctgtttctcagcaagaaaaccaccggcaaggggccctaaaatgagaaacaatttagtaagtttcaagtgtatcagggcagaaatggcaggaaatggcaacatgtaagaagggcatcttccaccacttaccaagcgcaggtcccagaaaaggagctgtgacaaaaaatcccgttgcgactccgcgctgtgtcttgctaaacatgtcggcaatgacacccccggtattggtcatcgacgacgaaccaaatgcgctagcgaagaagcgaagaaccagcaaggccgcgatattgggagagcaggccgccgccacgctgaacgccgtgtacgccatgaacgaaatcacatagatggacttgcggccatacatctccgaaagaggcgcccatatcagcggtcctacagcgaaccctaacacgaagagcgacaagcccagcgtggccacctcctccgacacgttaaattgctgctcgatgcctccgatgccgctcacatacaccgagctggaaaaggtcaccacaaacgtggatagagactggagaatggagatggcccattttcgcccattggaaaaattcatggcgtcttggtggtcattgtgcaggtaatcgataatgtatgggtcatcttctgtacctttaccagtgtaattctggttgcagacattgtcgttgaggcgtgcgtggaagaaaagatattggatccaggacatgcgtcgagaggatgcctgtgaattcttgacttgctgagggatctcattgttggagacagtggcctcgggaacgacagccatgttgggaacgacaggaagaacagggaagcaagtgttaagattcaagatatagacggagcaaaaccaactagttttcatgcttgaactgtctttactaagtaagtatacaaatcgtgcgcacagttattggttatatagttcatctcggacattcgcaatcggagtttcagcatggcgatattgccgagaacaaaagcccgcggcattatctgcggaaatatattttcttgacacacgacaaagttgggcgatatcgccgaagtgtatgcatcggcccagatcaggatattttctaagctagctagtgatctgtaatccacaggcttccatatgcttgtggacgtggtgtgccttttaatagatttcggccccagctgttgacatgatatatgtgactaccgctggaatcatcgattgttcgaggacgacagttgctctttctctatagaagtctctttagaaggaggaatatcccggaaatttgtattgtctagagcctgagttgatctaggctattaaaagtgatgttatcaagaactaaattgattcgccctagtcgtttctggccttaggtcatttttggcgtcaatcccacaggtcctgatattctagttgtactgttgtggttttacgtggatatcagttttgaatgagatgcaatgtttgtttctgtctaaggcttgacttgaataattaccgtgtactaggtagtgcaacttgaaactgtgtccagattctacctagcataaattggagtgtagtgaaaacattcccatgttaagtcttataggactcatcttaggagagaaataaaaaaccgctgagaatagcgccttgaatgctcgggaccagacctgaccaacagaaagacaaggaacagaatggtatcacaaaagcgctgaatgcagcaggacacaagaaacagggtggaatcaagaggaatggagaatggagaaggctacttgaagaaacggtattttttctccttcttctcctttttctctttctccttcttgtccttatctttcttgtcaggcttcccgctgccagatgaggcagggctgcttctgcttccgtttagagacataccagccatcagcgcctctggcggagctggggggttgaggtgtgccgttgacacaggcttcttctgtggcggcggattgggggctgggggagcctcgcgctcgaagagatgggccggggcagtaggtttggggcgctcggatgggaggtcgagacgacgccggtcaacaccaaggtcgcctacctggcggaggaagagacctggggtcagcatgtgcgtcgtggcaaggtagacgtcccggttgtatgccgctgagacttcataacaagctcgtgactcgccgtaggtagcaccaccggccatgaagacgattatgcgttgtcgaggctggtcgacggatcttgtgcgcgcccaggtgggttttgcgctgcgcaaagaggcctgctgtgactgtatttcctgggcagctatggcgccgtcagtctcggtgtgtggacgtgtgaaggggaaggtagtcgcgtccagattgccctgaatctgatcttcaagcatctgcttgatagctaactcataccggctcaggctgagctcctctgattcgggtggtgggtttcgtcgggtgaaaaggggctgcactggtggcttttcatccttgagaggcttctcgatacgaactccaaggagttcgaggttggcaatcaccccgccgtcttttggcgggagtccagcatgcgccatgagtttgcgaatgtcaccacctaacaatccgccgcgatacatgatgtacaaaagtatgagtcgaagccgatctggttgtacgactgagtcgtcatcgaggagctgcacgagttgccctgctaggttctttgcctttttgtagttctcatccaggcccgtggcgaatgactgctcggtggagctcacttccaagagtttgcgggactggaagtagttcatacactcttgtgccatgttgaggtgcagcgtgtaggcacttttaccctcttggaactctgtcagtccgcccaacatatccttgatggtgttcacattagacttgtcgttactaaaatctcaagttagtggtccgtgtatagggatggcccgttgaaactcactcgtctgcaaactgagggtgcgctgctcggaatttggcaaagtcctcgcccagtttcccaagcacatccttcatatgcatatggcggtaggtcacccagactcgatcatgctcgccaatttccatctccttgacctcctcattttggtttccctggttcaaaaccgttttgtaggtaaccttgtctccatccgtgacaggaagaagatcatggaccatagcctggtatgtaaactcgtgaatgaggggcgcgaacaggtccatggaacggtctactacgagcagtacgcctcgggggcggtttgtttgaggcggaaagtcacgctgatgctgcgcgaactgatccaattcgttctgaatgaaacgcgccaagtgagaacacataactccagcctcgtgagtcggagatcggggccgatagtaccgaattatagggtattcgcctaaagaagcgcaaagagataccacctcgattcaacgtcagcaagcccaattggcatacacggatagcatcttaccttttgagccaattcttccaaatgaccccgaatcaaattgttgcaactcgggtggaagagcactgggaagctccacggatcccggaatgtgatcaaatgcgattctctggggtagaaattgatgttcatagtgtagaagtccgcaatgcgctcgcgcgctatttgggaccggtcaatccgagctcgctgctgcggatcgagggctataggctgtgtgagcggaatgacgtcgcaaaggcctcgggttcaccagcccactaacatgaagtccacaccaagaatgcctttctgtatcggcccacctcgaagtctgccatcagacagtcgaccacgtacgattccggggacaatatgtacaacgcgtccatatcgggattggacggtcgtcgatgttcgagctgctcgacgtctgcggtgtggcattagtgacatcgtttgggtcgcaaagcacaagacgagctcactggagacattgagattgagaatttcctcctccttcacagcaccgtagaccaatttcttgctggtctcatctaccaccaagactttccactattagggggagaatgccgtcaatatccgcggtagaggggttgatcgggggagggggggtgggctcacctcatcgccaccggaattgcggattgtgttcagtataactattccagacagttcaaggtcagccaaggttctttgcaagaggtagtagaagtagtcacccacagtcgcgttgaatgttaattatcgaggagcccatgctggcgggcagccctggggcttcagaatgaggattaggacaaaaaataaagaaaaagagaaaaaagataggcaatagtaaaggagattgacgagatgttcagttaaaggggaagagaggagtgtcaggtggccgtctgaggtatatgaagggaagatggttttccccaccattggagcttgaaagtggatcggctcgataagggaactttttggtttctcctatgcaggttcttgttctttatcctctctacctttctcttttttggcttcggttcaactgttcggccttctttgttcccaaattgttcctctctacgggattggagtccccgtcgtccaggaatgcagccatggactagcggtagtcgttccctctatgctttgcggcccttgactcgttttgctgtacggcccttcaccacaacctcgattctgcagcgctcgaaaaaggtcaaaacatcgccggacaggaaagcggacacaaaaaagggcaaaacacttgtggggaatcccgccgggagatccatccgacaggatattgcggccgcacgagatttcaacgaactcgtggaagcaaccctacgcgatgtatacagcaagttgaacaaatcaggcgaatcgctagaaggatggacccaatttgagcgccaaatcaaaaacgcctgcaaatcagatgataagaaagcctctgcacaatggggaccccttcggcatatcaaggtagcgctgcaaaaagcctacctggcatccggacttcagggtctgcgggaggaggtggaatacatgcagtattcggaaaacatcactgccaggttttcggcacccatcctggaagcacagcaagaagtggccgaccttcggtggccagccgagtggtatccgcgcgcacgatcgatgcagcgaacaatccatctccatgtcgggccgacgaattccggaaagacctaccatgcgctgcaacgactggcgaaaagcaagaacgggttttacgcaggtccgctgagattgctcgcacaagaagtatatcatcgattcaaggcagatggggttccatgcagtttagtcactggtgacgacgtcaaatttcccgaggatgatcaagtaccgcgtattaccagtaatactgtggaaatggtcagcctggggcaggaatacgatgttggcgtgatcgatgaaatccaaatgattgcgaactcatcaagaggatgggcatggactcgagccttccttggtgctcaggccaccgaactgcacctgtgcggcgaaacccgcgctataccattgattcgggagctatgtgcactcacgggagatactttggaggtccaccgctacgaacgcctgaacgccctggaagtgatgccacatagtctaaagggtaatctcaatagccttgaaaaaggcgactgtgtagtcgtattttctcggaaaggtatacacgctatgaaggcagacattgaaaagaccaccggaagacgcgcagccatcgtttatggtggtctgccggcggagattcggacccaacaggccaatctgttcaacgacccagacaatgactatgacttcctcgtagcaagtgacgcgattggcatgggtcttaatctgtaagttctgtgctccctggttatatttacgctaccatactaacccacgataggagctgcaagcgtgttatctttgacactctcgtcaagcgtgtcccgactggacttcaacggcttactgttcctgagatcaaacaaattggcgggcgtgctggtcgatatcgtccagccaatgccacggaaagcacaagtgaggagcctaacgtgggcctgatctcctgtctcgaagaggttgaccttccatatatccaacaggctttgaagttggagcccccaccgctgagtgcggcgggcatcttccctccagaatctgttttccggaaattcgccgcctatttcccaccaggtgtacctttcgaatatctgatcaagcgggtcctggacattgccaaggtcaaccctttgttcttcttgtgtgaccctagcagtcagttggagaacgccgagattatcgacactgtcaaaggactgccgtttgaggaccagttaaagttcatggtttctccaatggaccgtaaaagttcaggctcgcgtgatgttactggtgctatggcggactgcgtagccgaacaccatgaaggacgacttctagatatcgcccatctcaacctggaagttatcgagcagcccgtttctggcagcaacgactatttgcatgatctagaaagccttcatagggcagttatcttgtacctgtggctcagtttccgattcggtggtgtcttcactgaccgaactctggcaagtcatgtcaaggaacttgttgaagagcgcatggttcgggcattgaccgagttctctgccaacaagaggctgcggaagggtgcttctctgaagcgccagattgcgctgcagaaacagttgttggagcaggaacgtatgggagttgctggagactggatgaagccctctggtgagggagagcagattgaaatcaatctgcccgaagaaggtgcttcagaggctgcggaggctgcggaggttgcggagggtgaatcctctgacgccgaactctcattatttgaatcgtcaccggaggcagagggcgaggaagagggcaaggaagagggcaaggaagagagctcatcacccgactttgacgactcggagcctgaactaacagagtcatactatgacacagaagtccccaaagagtgatgaatatgtacaacaagaaatatgtatattagatgtataaaaccgatctccaatactcatacctaatacctatcaattatttctttttgctcaattgtacgtatttttcagcttgcattcacatattgattgaacatgttggaagactcccaataattactattacatctgcataaatggatgatgaagccttgccaagagacagggctacctcgggtgaacctagcgctcagctcaccgattttgtgccaaggatcgccttatcttatcggtggcaacttcggccatactaattttccgccatcaagatctccgaagagctacagggtagcagtgttttgcgcgctcgccaattttcacgttacttatccagttttgctggctctgtcttttatctggttggatctcttttgttccaccgcccatcatggatgacctcgagtctctggagctgttctcgctcgtctcgcgcgtgacgaacgagttcgagaaccatctgggaatcgccgacaagactctcgcagagttcgtgatcgatcagcacctcaaatgcaatggcaagttttctgaattcaagaaatttttcgacgacatgggcggcgaattcccgcagagtctcctggaaagtgtcgaccgcatggtgctcacgatgcaccccaaatacaaaggaaagaaagcggagaacggcaaaggagcttcagatgccaaagacgatatggatttgcttgatgctctggagcaaaaatctcgcgtgttcaagggccttgcggtccccgatacggagaagcgctgggaggaagaagactacacagatcctcaaggcgcagacgaggccgatgcacaggcaggcgcgatggacgacacttttgccatgctcgagggactggcaggaaaagcgaaggaggacaaaccgcatgcgccgagaaacgatcgcggaactaggaagcggagccgcagccccgagaacaacgattacgaccgtggacggcgcagagacaaataccgctcgcgatcaaggtctcgaagcgccccggggtataacaaaaacgatgatcttgtggacgagttcgggagatcgattaggaaatatggccgggaagacagccgtcgcaatggccatagtgaccatcggagacaccgtggtcgcgacgaggataatgatttccgtcgtcctccgcctctcgagctggatgaccatcccgttcttttcaaggtctatgatggaaccgtgacaggtgtaaaagatttcggtgcttttgtgaatctaaagggcgtcagggggaaggtggatggtcttgttcatgtttcagcaatgcaagaaggagcacgagtgaatcatccttcggatttggtctcgcgcggacaaccagtcaaagtcaaagtggctagtatcgaaggcactcgcatcggactgtccatgaaggaggtggatcaagtgacaggcatggatcttgttccccagaagcgccttgcttctggtgcaaatatggaacgcctcgatggtggattcatagatgacaagtacggcagcctcggatccgatgtgcccgttattgaagggtctggaggtcgaccaatgaggaaccgaaagcgcatgacttcgccagagcgatgggagattagacaattgattgcctccggggttgcctctgcagcagattatcccgacatcgacgaggaatataatgcaacgctcaccggcgaaggcactttcgaagaggaggaagatatcgacattgaggtcaaagatgaggagcctcctttcttggctggccagacgaagcaatccctcgaactttctcctattcgtgttgtcaaggcccccgatggctcaatgaatcgttctgccatggcaggcactaaccttgccaaggagagacgcgaactaaagcagcaggaagctcaagacaaggcggctgagaaggcggcagatgttgatctcaatgctcaatggcaggaccccatggttgcaccggaagagcgaaagtttgctgctgatcttcggagtgcccagcaacccaagcaggacgaggctgtaccggagtggaagagagtgacgatgggcaaaaacgcatcgtttggaaagcggacaaccatgtccatgaaacaacaacgcgagagtcttccagtctacaagttccgaaagcaattgctggatgcagtgaaggacaatcaaatgatgattgtcgtcggagatacaggttctggaaaaaccacgcaattgacacagtacctggccgagggcggatatggaaacaccggaatgattggttgcacccagcctcgccgtgttgctgccatgtcagttgctaaacgtgtagctgaggaagttggttgcaagctcggagcagaagttggatataccatccgtttcgaggattgtactagcccagacaccaagatcaaatacatgaccgacggaatgcttcagagagaaattcttttggatccagacctcaagagatattccgttatcatgctcgacgaagcgcacgagcggacaatcgcgactgatatcctgttcggactgttgaaaaagacagtcaaacgaagaccagatctcagattgattatcacctctgccacactggacgctgaaaagttctccgaatacttccacggctgtcccattttctccattcccggtcgaactttccctgtcgaagtcatgtactccaaggagcccgaatctgattatctagatgccgcactcatcactgtcatgcaaattcacttgacagaaccgcaaggtgacattctgctcttcttaacgggccaagaagagattgatacagcatgtgagatcttattcgagcgcatgaaagctttgggacctactgtccctgaactggttgtcttacctgtttactctgcactacccagtgagatgcagagtaggattttcgacccggcacctccaggcggacgtaaagttgttattgcaaccaatattgctgagacctcgatcacaattgatcagatttactacgtcattgatcccggttttgtgaagcagaatgcctacgatccgaagctcggcatggattctcttgtggtgactccaatttctcaagcgcaagctaagcaaagagctggccgtgccggaagaacgggacctggaaagtgcttccgattgtatacagaggctgcctatcagtctgaaatgcttccaacaaccattcccgaaattcagcgtcagaacctctctcacaccattctcatgctcaaggccatgggtatcaacgacctcctccacttcgatttcatggacccaccgcctaccaacacaatgttgacagcactcgaagaattatatgccttgtcagcacttgatgatgagggtcttttgactcgacttggacgaaagatggccgatttcccaatggaacctgcgcttgcgaaggtgctcattgcatccgtggattcaggctgctccgatgaaatgcttagcattgttgccatgctatcaatccagtctgtcttctaccgccccaaagaaaagcagcaacaagcagaccagaaaaagtccaaattccacgatccccacggcgatcatctaaccctcctcaatgtctacaatgggtggaagaacgcaggcttcaacaactcctggtgtttcgagaacttcatccaagcacgacagatcaagcgcgcccaagatgtgcgccagcaactactaggcatcatgaaccgttacaagcaccggatcgtctcttgtggccgagataccatgaaagtgcggcagtctctatgtaccggcttcttccgcaacgcagcacggaaagacccccaggaaggatacaagaccctggtggaaggaacgcccgtgtacatgcaccctagttccgcgatgttcggcaaaccggccgagcatgtcatctaccacaccctggtcctcacaaccaaggaatacatgcactgcaccactgctattgagccgaaatggctcgtggaagcggcgcctactttcttcaaggttgcacctacggatcgattgtcaaaacgtaagaaggcagagcgcatccagcctctgcacaaccgctttgctggcgaagacgattggcgtatctctgcccagcgacgccaaggcagaggtggtggtggtggaacttggggttgatttttgttatgtttccaatataccagctatgcttgcaaccgtgtgttattttctgtcttgcgtcttatatctctctatcattgtatttttgcatgaatcacttagcttaaaatatcggagttggttttttttcgatctgggaataatttactggttgtgcattaaggtggcagtttgaaagaatatcctacttgcaaagagcatttgtcgtaaatatgtcaaaacctcctcctatctggtgcagagtatcgcagtgcaattactcgggactttggtattttctctagtcaactcggagcaatatagaataatttttcctacgaatgagattgaatggtaagtgaccaaatgttttagaatcagtttcaagcccgtttgacactcctagatacacgagttcatatccttcgcaacaacccagtcatcactcaaagtggaattcgtctggtcatgtcagtaggttcccaggagcagtatagttgtcaaatagtcttctagcctacacattcttcctcatttccatgcttgagaacttcgggtgcagtgccagcagtggttgttttggtgttattgctcttatacgcgtcaattgtccagcctctgactttcgtgattgcgttaagctggcgcgtgagggtctttttacggtggacgtccattgccataatcttgcactggatctgttccttaagcgtctccattcgagatgtctttctcatcctctcctggcacaatccaatccatttatgagaagctgcgttggtcatctcgctgtccaggaccgcgatctccttgacaaggtcgttcagctcggccatttgggctttgatgacatcgctggtgttgtatttcaccatggtgaaaacaatagtaacgatgcagagtaaaagtcgtgaagaggaggataattagaggaagaagaggatgaggtgatagaaaagttagtagggatggaaagaagtgaatagaagaattgaatggtataaatagcccaagaagctgttttccagttggcaggatgggatgggacgcgtcttagaaatatatcaaatcatcataaggaagtgcacaccaaaattcaggatcaatatgtggtagcaagagatgagcaatgcacgattacttgctataaaataaagaacgaggttcgtaatatacgttgtcacgcacctactctacctgagatggcttgcgaacaagaaaatacatcaccattggctccgttccaccataatgcgaataatccaccgataccgtatctaccagtcgaaagccaaggctaagatatagcttcaatgcagccggttctgacatcacataggtctttattccttgtcgacctacaactcgctttgcacgagcattctcccgatgcctcggcgccagaaagaagggtctgtcgtcaaataatcaagagctggggagtactatctatcagttatcagcctgctagtgatatatcggtgtgcattttactcagaaatggtccatctggcataattcgaggggctgcttcttcgaggggtgcactgcaataacgcatcatctcccggtccttcaagcctataggccgtccactccgggtgttcgatcgatactgtttctcatagactgcgcgatcggcggaagtcccttcggctgcctgtgcctccaaccaaatatcgcccttctttgtgagaattggacatcaaatactcgatctagccccttttagccattgtggccaaactgattgctcggaagccatgcagtatataagatgataatgatcggtatcaaacacaaaaatcaacagctttccatctttgccaatgccgtatgacttcgataagcaccgataacctcggaattggggtgaaataagacgaacaagtcaagaatcaaacgcaagaaagagggttgtatgcatcgggggccattcatatcgccgataatagtagaacaagtgtcattaccatacagagcactctctagcagcctggctaagcttttatttcaacatcatattaaggaatggaccacatacacatgcacttggtaaaatgatgtaaatgatgttgtctccacttattggaggctaactacacaccgcctcggtattaatatggcagaataaggcggtgtatccacacttttgtaccgggcggggaggcctcggccaatcaacgagctggaaatgtcgatggtatcggagaacatctgaagataaaaaaaaaaaagttacaacaccaacccatcaaatcatgtcgcacatcacagaacatccctctcgggcgaagagaagaaagattgacgatcctaaaccggagaaaacggccgtcatatccaatatcaaatctgctgcttcgttgcgtgaattgttggctgtccagcaaaatgccccgttggcaaagcaaggtgaggcaggtcgcaaaccatcctaagctacaacaaaactgactagcaaataggtataatcaagtttaaagagttcttggtgtcaattgcacacacggaaaatgagagcgaaaaggcagagaaattgcgtgtcctcaaggattattgcgataaacagatcaccaactccggaaaggaggatgaaacctcagtgtgctttgcggatataattcaatcttggtcctttggcgatggcaataacaacgagcctttactcactagcgtcccttctgttcttgcgatcttcctcaagacgatctcgtcggaactggagttccgggaatttggaatcgccctgtgcaagcatttgctacagaaagaccagctgagattgttcaaccgcggtctgacagcaaccaagtctaaagagcacttgatctcaccgtgcctgcgtttgcttacggagatcgtgacttttgacggaggagcagtggcacgacagctgtatcttcggcgctacattacctttaagcgactggaggtcttcctggcccctaacaaagcacaggagatctcaggagatgagtcccacaagtcgacgctcagacgcaacgctcaacgatacctgctcgcaaacctgagagtccagcatgcctccgagaagggtgatatcatcgaacagcacaagattaccaggtctttccttgaatatatccggaaggatccgcgggatactgtattagaaattatcaaggctatcgaaagggacgtggtacaagattccgctctgtcccgcaaatcgaagagcaagtttttcaacagacataatctcgaacgactggtgacgctttatggctatgatcgagagtcagatgaacctaatgctggaggtgtcgttatcgccaatgagatccaccgagtcatgatgaatgtgtgcaaaaccgccgggctcggtgtcctcttgcccgagaccggctggtatcccgtcggaaccgatccagagaccttacccgttgatgatgatacatgcattgaattaggccttgattctcccatatacgtggacaaataccgagagtctatccccgtgcgaaatggttccctttcattcctcattcagtgccttcggcctgatgtggatagtctccagattgaactgctggtttccatcttcagggttgcaccagagcttgttgccgattatttctcaagaaaaactatgtttatttcagacccaaaggccaccccttcgtggatggccgagtcggccttccttttttcaaccgtgcagttgcctgtccctgcaaactgtggctggaaggataaacagcctatcctgccaccgccggtctctgtcgttattgaaaatattctccctcgtccccttggccagaagatcatgacccgctgcctcaaccagaatgcggagatcatcaccttgttcgccgtgcgtatcctgactctcgcattcactaagctgcgggctgtcctcaaaatcttccaggcggatcacggccaaggccaactattctggaatcaggcttctgctaagctgctggcagagttctcccgccgatgccctgctgtcaaggatgtcgttgtcctcttccgaagaacagaaagggaggacctgacccagcaggaggctgttgcagagcttttgacctgttactatgaagtgatgccggacattgctctagaggaaaactttgacgtctccctagttttggtggatgttctcaagcgcctggaagccccagacattagcgcggatgattctgaatcgcttttgagccaacttcagagtatcctccagatcgcacaacaatcagcttcattgcgttggtggcaaaagccagcatccatgcaatactcacccttcacctcgattctcaaggttctcatggatacttcagataaagattcttcgcggcgtatctctactctgttcaagactgttctggttgataactctgttctgcaaagctccccacacgcatttgcatctgtcttatcaagccttgagaattccgaggctgatgctttgcatcagcagctggtcttttttgataactgtgtctcccgtgttgccaagaagccagttcactaccaggacttgctacagtcattatccgaggatgtgtctagaactactagcgcgcttgttgctgccattgttgagcaatggccatttgtcgtcaaaggcggagatgcatctacggaagctgccgttggtgcctggatcgcaagtcttctcggtaatctgaagcaggcgggtgagagtaccaaggtacttaaagctgctcgggatgcgttggttgaagcaactgagaccaaaaagatcaagtctcttctcaagaagtccgtgaaagaggcagatgatgccgacaacgaagacaagatggacattgactctggctctaacgtgcctagttcatccaacaaggcctctgccgttgacctcgatgagatctttggatccctgcccactgaaggcacgacccacaatgccctgaacaaatgggaaagagaggacattgcagaagcagtagaccagggtcatgtcgccgagttgatgctctgcatttgttctcagcacgaagaagtccggagacaggccttcgccaacattattcgcttcatggccaaactcaaggattctacctatgcagaatggcgcacagtgtttactctagctggcgagctcctcgagacagtcaacaacattggcatggagaagcccgttccctggattgtgggcgagtgcgcttcaaactgcctggaggttctcatagaccccctccacaaggtctacggaaaagtcaacaagttcctgcagaaggcaccattatgggaagtcgagaagatcccaacatactgggtcgataaaatcctcttgcacgaacctgagttggatgatgggtatttcgacgagatcgactggctcctaaatctatttatcaaggcactccgcaccgaggctgtaagtttctacctttcagttctatactccaaaagcacgattgctaacacattgaatctaggatatggaggtttaccgacgagctaatgtcttcgaacgcattctttccctctaccagtccccaaccctcggcccagcagctcgacgaaagatcctgcacattgtataccgcgctgcccaggtgggtggcagtactaccctgatcactcgttctggtgtcatcagttggatccagatccaagccgcagaggctgatacgaaggaggctgctcagcttgcagcacttgcacgtgctttgtatgagacgtgtgaccgggagcgggttgatggctggagtaatggaactcttgggcgggtcgttgatgagatccaggcgcaagtttgaggtgttggaatttgtacaatagcagatcgtttggatgattggcgttcttgcctttctgaacatatgtagtacggcagtctaccgccagtccgatagtaaaatttgacctggctcaccggattcttattgcctacatcctccttcacactatattatatggcaaaaacaaaaccaaaaacatacagcagtatgtttaaggtggtggtggtcacggttcgggcatccgacaaagagagaattcttggcgcaggccgttaacgtgcactcatggtgtccaaatcaaattaaataggatcacacgtcaagtctggttgtgctgtatctaccattccctcttcaagcccataaaatccttatcctcggtcacagcatcgcccgctttctcaaacaccctgagaatctgagagttcctctccttaacgttacttaacataatgtcaattgccttcgcggcctgctctccaagaaccatctcatctgcttttgatgcttcatcggcaatctcatgtaaccgcttaagccagtataaccatctccagggactaaatcctccaggtgcccgttgacctagctccgactggacaaaggtgaagccacctgccccaaaggtagtatcggagcaatcattccatgagacatcggataagagtatgatgttatgcccggcttctcagatccaggcacatgcagatgggagtaacgacgcaatagaacgtccaggcattgttcggcgatattcttcgtgttcatcatccggctcattagagctcccaagaggacgctcgcactcgaatgtgtcccgaaaaaggatcagagcaatctggcaaagccgatcgttcgcaatgcgcgtggacgcaagcttcgcaaggaaggacgcagcattaaggcgctgctttgcgttcatttccgcgcagtcgttgatccagcactctgtcatgtccgtcgcaaggaacggcatgtcgttccagactgtcccatcgagagttctagcaatatcgatgccaccgcccggcgccggtctgattagaggcccgcgtccccgcgtccggaggatgtcgaggacccatctgtcttgctcaaagctttcgtgggagacatgcctggcgcattggtaatagacgcaccagagagaatgcagagacgtctcgcaggaatcaattgacgcccggctctggcaatagctcaggcccgtgatccatactctgttatatgccaccgattggaggaggtcgaaattccctgctcgtgcagcttcctccaactccgcccgatccgctcggctgcatgcagcgaagccgccagagctagctcgcggtactgagctcggtgaatctcttagtaaatcgtgcatcctaagttcaggaatttaaagagctggcagtaccgattggtgatgagtgtcaagagggtgaatctctagaaatgagttaaacgtaggagaggtagagtgcaatgggattagacaatatattatttatataaaaaaaaaaggctgactgtataaagaaaatgagaagtctctgtggcagacagcaacaatcttttgcttccaatcagacccgtatgccatttgtgatataccattatatgccattagtgacacgtcgctgtttagggtaggagacccactggggatcagaaaaagatcagcaggcgtgttcatgacccgatatttggggctagatacgctgactatctcggggaatccagcagagttgaaatgacggagtacaatgatgcgaattatagaaatcgaggtaacagttcacactcaatgctggtatagtgtagaaaacaggacaacatatattgaaatgcagcaaacttgtatatgttcctctacagtagctgctccacgatcaccgagtaccaacacggaaatatccgccttgggaagtcacgacattctgacagatacactttctactaaaagaatcaaaataacatgctttactctcaactgtgtcggtgcactgtgcgtagaagttagtatactcctggagcaatggggtcgagggcaaattacctttttgacctcgcaaccacagatagcgttcagcccactatgagttctataatggcattggttggtttccggatagcactcctagtttgaaaagatcaggcccttcgtctcgtacctcaatgaaccttggagatttactcctcggtactgaatctggcgattgttttcatttctggcatccaagtcatttgatgtaggagatctagggctcgctgggctggctaatgcgcccagagcagcagagagggcaagtccagaagacataaaggtaaaagctttcatgacgacggcgtgcacctttggttacttaagaagcaacaggactgatgttttcgaaaagggatttgtgttctcatctaactctggtatatcgggtctgtagtcatcttatatagactcgattccaacccacagtgggagatcttagataggacaatagtcgaaggtctacggctgggtagcaaactcgcaacaatagtaaggtacatgggaacatttaggccattacactaggccaagcgtccctccaaagaaggaatgtgctgcatcaaccaattgcttaaggctagttatgttgttacctgattgtctacaggcgaagtccgcagtggactacaataaagaaaatacatggtctcagtggatatcccctgttggcatcttactggcggacagccaagcgggtaatacacccgtgcattagtgttgtctcaagattgcggcggctcgctggaccctgggagatcgtcgctcgcgctaagctagaaatttacgcccgtgtatgggtattgtcttaaggggattgcggcatagttagcctcgaccgacgctaagcttatagacaatgacaatagtatctatgataaccgtatggtcattgaatcgagtactagtattaatgttcgaagtcatgtgacctctctccgctcccaacaactatgttagtcccagcagataggtagtttccttttctctcttcacgcaattcataagaactttccagagtatctatatttcatccgtagactccttgatttatctctaataggttataagccctcgttcttgaagctactgtatcactgtaagcttcaatctcttttatcctcctattggtgctagcgttgtaccaccctatactagaattcctttttcgcgaattggaatcctaaccggctgagactaacatcctaaccatagttattatactctataatagtgtacttctattactctaattagttgactgttaaccttgctggccgttcgatactctgatttgtcgactattatattcctgactgttcttaaaaatctaagttaatctactgccttaagtagtagatcgctatcctctagcctaaaattttagggaataccgaattaacgacccctaagggctctctatctcttaaccctatcgttagagggttgcctctctttgaagctttatagctatctcttagagattcgactcttaattgtaaaccatttttttctcttaataattaggctattgatagtaagatactagtttcccttaatatatcttcgatttttaaatataactttaagcgttataataaatccgatattaattagactatttgacggaaaaacggtggtaaggcgagtgtattttgtggcagaaaaatcttaataaattctctaactctctaaaactgacaatagtcctaaaacatgacaatctgatggacaacttagtaatcaaaacaaacaaaacaannnnnnnnnnnnnnnnnnnnnnnnnnnnnnnnnnnnnnnnnnnnnnnnnnnnnnnnnnnnnnnnnnnnnnnnnnnnnnnnnnnnnnnnnnnnnnnnnnnnnnnnnnnnnnnnnnnnnnnnnnnnnnnnnnnnnnnnnnnnnnnnnnnnnnnnnnnnnnnnnnnnnnnnnnnnnnnnnnnnnnnnnnnnnnnnnnnnnnnnnnnnnnnnnnnnnnnnnnnnnnnnnnnnnnnnnnnnnnnnnnnnnnnnnnnnnnnnnnnnnnnnnnnnnnnnnnnnnnnnnnnnnnnnnnnnnnnnnnnnnnnnnnnnnnnnnnnnnnnnnnnnnnnnnnnnnnnnnnnnnnnnnnnnnnnnnnnnnnnnnnnnnnnnnnnnnnnnnnnnnnnnnnnnnnnnnnnnnnnnnnnnnnnnnnnnnnnnnnnnnnnnnnnnnnnnnnnnnnnnnnnnnnnnnnnnnnnnnnnnnnnnnnnnnnnnnnnnnnnnnnnnnnnnnnnnnnnnnnnnnnnnnnnnnnnnnnnnnnnnnnnnnnnnnnnnnnnnnnnnnnnnnnnnnnnnnnnnnnnnnnnnnnnnnnnnnnnnnnnnnnnnnnnnnnnnnnnnnnnnnnnnnnnnnnnnnnnnnnnnnnnnnnnnnnnnnnnnnnnnnnnnnnnnnnnnnnnnnnnnnnnnnnnnnnnnnnnnnnnnnnnnnnnnnnnnnnnnnnnnnnnnnnnnnnnnnnnnnnnnnnnnnnnnnnnnnnnnnnnnnnnnnnnnnnnnnnnnnnnnnnnnnnnnnnnnnnnnnnnnnnnnnnnnnnnnnnnnnnnnnnnnnnnnnnnnnnnnnnnnnnnnnnnnnnnnnnnnnnnnnnnnnnnnnnnnnnnnnnnnnnnnnnnnnnnnnnnnnnnnnnnnnnnnnnnnnnnnnnnnnnnnnnnnnnnnnnnnnnnnnnnnnnnnnnnnnnnnnnnnnnnnnnnnnnnnnnnnnnnnnnnnnnnnnnnnnnnnnnnnnnnnnnnnnnnnnnnnnnnnnnnnnnnnnnnnnnnnnnnnnnnnnnnnnnnnnnnnnnnnnnnnnnnnnnnnnnnnnnnnnnnnnnnnnnnnnnnnnnnnnnnnnnnnnnnnnnnnnnnnnnnnnnnnnnnnnnnnnnnnnnnnnnnnnnnnnnnnnnnnnnnnnnnnnnnnnnnnnnnnnnnnnnnnnnnnnnnnnnnnnnnnnnnnnnnnnnnnnnnnnnnnnnnnnnnnnnnnnnnnnnnnnnnnnnnnnnnnnnnnnnnnnnnnnnnnnnnnnnnnnnnnnnnnnnnnnnnnnnnnnnnnnnnnnnnnnnnnnnnnnnnnnnnnnnnnnnnnnnnnnnnnnnnnnnnnnnnnnnnnnnnnnnnnnnnnnnnnnnnnnnnnnnnnnnnnnnnnnnnnnnnnnnnnnnnnnnnnnnnnnnnnnnnnnnnnnnnnnnnnnnnnnnnnnnnnnnnnnnnnnnnnnnnnnnnnnnnnnnnnnnnnnnnnnnnnnnnnnnnnnnnnnnnnnnnnnnnnnnnnnnnnnnnnnnnnnnnnnnnnnnnnnnnnnnnnnnnnnnnnnnnnnnnnnnnnnnnnnnnnnnnnnnnnnnnnnnnnnnnnnnnnnnnnnnnnnnnnnnnnnnnnnnnnnnnnnnnnnnnnnnnnnnnnnnnnnnnnnnnnnnnnnnnnnnnnnnnnnnnnnnnnnnnnnnnnnnnnnnnnnnnnnnnnnnnnnnnnnnnnnnnnnnnnnnnnnnnnnnnnnnnnnnnnnnnnnnnnnnnnnnnnnnnnnnnnnnnnnnnnnnnnnnnnnnnnnnnnnnnnnnnnnnnnnnnnnnnnnnnnnnnnnnnnnnnnnnnnnnnnnnnnnnnnnnnnnnnnnnnnnnnnnnnnnnnnnnnnnnnnnnnnnnnnnnnnnnnnnnnnnnnnnnnnnnnnnnnnnnnnnnnnnnnnnnnnnnnnnnnnnnnnnnnnnnnnnnnnnnnnnnnnnnnnnnnnnnnnnnnnnnnnnnnnnnnnnnnnnnnnnnnnnnnnnnnnnnnnnnnnnnnnnnnnnnnnnnnnnnnnnnnnnnnnnnnnnnnnnnnnnnnnnnnnnnnnnnnnnnnnnnnnnnnnnnnnnnnnnnnnnnnnnnnnnnnnnnnnnnnnnnnnnnnnnnnnnnnnnnnnnnnnnnnnnnnnnnnnnnnnnnnnnnnnnnnnnnnnnnnnnnnnnnnnnnnnnnnnnnnnnnnnnnnnnnnnnnnnnnnnnnnnnnnnnnnnnnnnnnnnnnnnnnnnnnnnnnnnnnnnnnnnnnnnnnnnnnnnnnnnnnnnnnnnnnnnnnnnnnnnnnnnnnnnnnnnnnnnnnnnnnnnnnnnnnnnnnnnnnnnnnnnnnnnnnnnnnnnnnnnnnnnnnnnnnnnnnnnnnnnnnnnnnnnnnnnnnnnnnnnnnnnnnnnnnnnnnnnnnnnnnnnnnnnnnnnnnnnnnnnnnnnnnnnnnnnnnnnnnnnnnnnnnnnnnnnnnnnnnnnnnnnnnnnnnnnnnnnnnnnnnnnnnnnnnnnnnnnnnnnnnnnnnnnnnnnnnnnnnnnnnnnnnnnnnnnnnnnnnnnnnnnnnnnnnnnnnnnnnnnnnnnnnnnnnnnnnnnnnnnnnnnnnnnnnnnnnnnnnnnnnnnnnnnnnnnnnnnnnnnnnnnnnnnnnnnnnnnnnnnnnnnnnnnnnnnnnnnnnnnnnnnnnnnnnnnnnnnnnnnnnnnnnnnnnnnnnnnnnnnnnnnnnnnnnnnnnnnnnnnnnnnnnnnnnnnnnnnnnnnnnnnnnnnnnnnnnnnnnnnnnnnnnnnnnnnnnnnnnnnnnnnnnnnnnnnnnnnnnnnnnnnnnnnnnnnnnnnnnnnnnnnnnnnnnnnnnnnnnnnnnnnnnnnnnnnnnnnnnnnnnnnnnnnnnnnnnnnnnnnnnnnnnnnnnnnnnnnnnnnnnnnnnnnnnnnnnnnnnnnnnnnnnnnnnnnnnnnnnnnnnnnnnnnnnnnnnnnnnnnnnnnnnnnnnnnnnnnnnnnnnnnnnnnnnnnnnnnnnnnnnnnnnnnnnnnnnnnnnnnnnnnnnnnnnnnnnnnnnnnnnnnnnnnnnnnnnnnnnnnnnnnnnnnnnnnnnnnnnnnnnnnnnnnnnnnnnnnnnnnnnnnnnnnnnnnnnnnnnnnnnnnnnnnnnnnnnnnnnnnnnnnnnnnnnnnnnnnnnnnnnnnnnnnnnnnnnnnnnnnnnnnnnnnnnnnnnnnnnnnnnnnnnnnnnnnnnnnnnnnnnnnnnnnnnnnnnnnnnnnnnnnnnnnnnnnnnnnnnnnnnnnnnnnnnnnnnnnnnnnnnnnnnnnnnnnnnnnnnnnnnnnnnnnnnnnnnnnnnnnnnnnnnnnnnnnnnnnnnnnnnnnnnnnnnnnnnnnnnnnnnnnnnnnnnnnnnnnnnnnnnnnnnnnnnnnnnnnnnnnnnnnnnnnnnnnnnnnnnnnnnnnnnnnnnnnnnnnnnnnnnnnnnnnnnnnnnnnnnnnnnnnnnnnnnnnnnnnnnnnnnnnnnnnnnnnnnnnnnnnnnnnnnnnnnnnnnnnnnnnnnnnnnnnnnnnnnnnnnnnnnnnnnnnnnnnnnnnnnnnnnnnnnnnnnnnnnnnnnnnnnnnnnnnnnnnnnnnnnnnnnnnnnnnnnnnnnnnnnnnnnnnnnnnnnnnnnnnnnnnnnnnnnnnnnnnnnnnnnnnnnnnnnnnnnnnnnnnnnnnnnnnnnnnnnnnnnnnnnnnnnnnnnnnnnnnnnnnnnnnnnnnnnnnnnnnnnnnnnnnnnnnnnnnnnnnnnnnnnnnnnnnnnnnnnnnnnnnnnnnnnnnnnnnnnnnnnnnnnnnnnnnnnnnnnnnnnnnnnnnnnnnnnnnnnnnnnnnnnnnnnnnnnnnnnnnnnnnnnnnnnnnnnnnnnnnnnnnnnnnnnnnnnnnnnnnnnnnnnnnnnnnnnnnnnnnnnnnnnnnnnnnnnnnnnnnnnnnnnnnnnnnnnnnnnnnnnnnnnnnnnnnnnnnnnnnnnnnnnnnnnnnnnnnnnnnnnnnnnnnnnnnnnnnnnnnnnnnnnnnnnnnnnnnnnnnnnnnnnnnnnnnnnnnnnnnnnnnnnnnnnnnnnnnnnnnnnnnnnnnnnnnnnnnnnnnnnnnnnnnnnnnnnnnnnnnnnnnnnnnnnnnnnnnnnnnnnnnnnnnnnnnnnnnnnnnnnnnnnnnnnnnnnnnnnnnnnnnnnnnnnnnnnnnnnnnnnnnnnnnnnnnnnnnnnnnnnnnnnnnnnnnnnnnnnnnnnnnnnnnnnnnnnnnnnnnnnnnnnnnnnnnnnnnnnnnnnnnnnnnnnnnnnnnnnnnnnnnnnnnnnnnnnnnnnnnnnnnnnnnnnnnnnnnnnnnnnnnnnnnnnnnnnnnnnnnnnnnnnnnnnnnnnnnnnnnnnnnnnnnnnnnnnnnnnnnnnnnnnnnnnnnnnnnnnnnnnnnnnnnnnnnnnnnnnnnnnnnnnnnnnnnnnnnnnnnnnnnnnnnnnnnnnnnnnnnnnnnnnnnnnnnnnnnnnnnnnnnnnnnnnnnnnnnnnnnnnnnnnnnnnnnnnnnnnnnnnnnnnnnnnnnnnnnnnnnnnnnnnnnnnnnnnnnnnnnnnnnnnnnnnnnnnnnnnnnnnnnnnnnnnnnnnnnnnnnnnnnnnnnnnnnnnnnnnnnnnnnnnnnnnnnnnnnnnnnnnnnnnnnnnnnnnnnnnnnnnnnnnnnnnnnnnnnnnnnnnnnnnnnnnnnnnnnnnnnnnnnnnnnnnnnnnnnnnnnnnnnnnnnnnnnnnnnnnnnnnnnnnnnnnnnnnnnnnnnnnnnnnnnnnnnnnnnnnnnnnnnnnnnnnnnnnnnnnnnnnnnnnnnnnnnnnnnnnnnnnnnnnnnnnnnnnnnnnnnnnnnnnnnnnnnnnnnnnnnnnnnnnnnnnnnnnnnnnnnnnnnnnnnnnnnnnnnnnnnnnnnnnnnnnnnnnnnnnnnnnnnnnnnnnnnnnnnnnnnnnnnnnnnnnnnnnnnnnnnnnnnnnnnnnnnnnnnnnnnnnnnnnnnnnnnnnnnnnnnnnnnnnnnnnnnnnnnnnnnnnnnnnnnnnnnnnnnnnnnnnnnnnnnnnnnnnnnnnnnnnnnnnnnnnnnnnnnnnnnnnnnnnnnnnnnnnnnnnnnnnnnnnnnnnnnnnnnnnnnnnnnnnnnnnnnnnnnnnnnnnnnnnnnnnnnnnnnnnnnnnnnnnnnnnnnnnnnnnnnnnnnnnnnnnnnnnnnnnnnnnnnnnnnnnnnnnnnnnnnnnnnnnnnnnnnnnnnnnnnnnnnnnnnnnnnnnnnnnnnnnnnnnnnnnnnnnnnnnnnnnnnnnnnnnnnnnnnnnnnnnnnnnnnnnnnnnnnnnnnnnnnnnnnnnnnnnnnnnnnnnnnnnnnnnnnnnnnnnnnnnnnnnnnnnnnnnnnnnnnnnnnnnnnnnnnnnnnnnnnnnnnnnnnnnnnnnnnnnnnnnnnnnnnnnnnnnnnnnnnnnnnnnnnnnnnnnnnnnnnnnnnnnnnnnnnnnnnnnnnnnnnnnnnnnnnnnnnnnnnnnnnnnnnnnnnnnnnnnnnnnnnnnnnnnnnnnnnnnnnnnnnnnnnnnnnnnnnnnnnnnnnnnnnnnnnnnnnnnnnnnnnnnnnnnnnnnnnnnnnnnnnnnnnnnnnnnnnnnnnnnnnnnnnnnnnnnnnnnnnnnnnnnnnnnnnnnnnnnnnnnnnnnnnnnnnnnnnnnnnnnnnnnnnnnnnnnnnnnnnnnnnnnnnnnnnnnnnnnnnnnnnnnnnnnnnnnnnnnnnagtcacgtgatccaactgtatcagggatgaaaaatgacagtattcatcctagattctgacactattcctaaacttaagggagaaagtaactttgctatatagtagtactgtctatatatagccttaaaggaaaataataaggtatatattaaaattatcttagaagataatataaagcctttctatcctaactaccttaactatagtaaaaatgttattcgttagctagctcttattaaagttagcggtaagatagaactaattactccgcttattataaaggaaatggttaaggaacgataaaacgaaaataaaaagctatataatacctattaaaaggaacttaataaataggattagtataatacttaagcctataatcttatttttagtacccttaatctaatcctagcttcttatattaagtagactaatattacgcgagaaattatttagatccttataagagaatatagtatactattatagtagactaactttaaatacttcgaaaccctctgtaatctttagtataagggaaataatccttaggaatttattcgctagtttaaggaagtactctttaagatttactaaaagagatcctctttagatcctataataacccttaatttttttatctatactatttagagtaatcctcgctattaggtatttatttaatccttaaaacctgatcttagtaatcactattttatagtagatatctattataagtttatccttatagaaggatctataaaaattgctagtagaggctacttaagctataatccttctataaatataatatctacttaaaaggatagtttatcctactctaattctaataataagaagaaggataataagaagggatagaataataataaaaagggatctttaaataataataataattctaataataatttttccgataaaaagctaaagaagaagtaatagtataaaaaagaggaggatattattttatatactatttataatactcttagaaatcactacttaagaaactgccctttaaggaataagtaaagagtagtgaatataatttattatacctaaccttagtagtttacttaataattaatctaataagtccctattctataacccggttagattattagctaagtagatacttaaggatagattatccctatttagtaatactagtaatagccttaactaggagtaaatatagtttatactctatatatagccctatctagtttatagtaaggacccccttctagtaacccctttaatagatataataacctatttactaatatactattctaagtaaatactacttatagttcctattctatttctaaggaaggataggctgtaagtaataataataatatttcttactagataattgacttaggtataagtacttatataaccccttattagttagtctttattaattttagataatatatattccttatcttaatagtaattagtaaagtcttttatatagaaggatatagagatattattctctaacttcttaattataatataactaattatctagtctctcttactctttaaaaagtttggcttatactagaacttaagtctagccttatttctatatctactcttaataaagtagatattagtacctaggtaaagaatagtattataatatttaagtactaagatacttatagttctcttaagttaattattagttatatactctataaaggagaatattactagctaaattattatagtattctacaggacggcaagcggggcgccagaaatggctcccattgccccgttttcccgccactcccgaccgcctgcccggctccgccatccccctgccccttccggcatggcgtccactgcgaccgcccaaccaggtttagcgccaccgaggccgcttttattgcccgacgcatccgttcctccctctataaaagaccactcgccctcttgtcaagtctcccacgcactttcactctccttgcccacccgaccccctttcttctcgcccccaccgaccccctttcttctcgcccccaccgacctacaacgcattggactcatcatcctgacgcactgccccttccgtttcaccggagatgccgctgcttccgatcctcagaccgttctggccagcatgggcgacgacgcgacctcaacgcccaggggcatcggctccgaattgatcagtcctcagtggatttttgaccaatattgattacaacagagcgacaggtgctctttgctacacaaattatccagatcgcttcccaccagaactcattgcacatcgagcctgtgctatctatcctcttccgccgacctcgtacgcctccatgaagtctccgaatgacatctttgatgacatattccccgcttccatctgctccttcgaggttacattgcacagctctcgtccctgatatactagcgtatgcttgctcacgactgccaagcgttcttttggcgtcatcaatagctcttttgggacccgatgcacacagccgagaaatcttcgactacacagcttggtatcatgagccaatagcgaaaatccctcagctgcacctgactcctgagctagcgattgcagccagaggcggatgactctattggacggacaatatgtggattcttgtcgtcgggaccgtcccctgtggacatgagattggaacccctgtattctcgcgtcatacatgtgatgtggcttccaggagaagagtgaaaccctctgcgctgcgcgaaagacgggctttgtcgcaaggatgagtgatctccgggtataaagcgaccttcaattccgcccctatggctgattgggaattccaaaccccttcccttcttctgcctgtttcttccctctctgccaataccccaattctcagtcctagtctcattcgatgagccctgccagtcaccatacctgaaaaccctttcaaaccccctgctccgaacatgtcaagcgccgatttccgcgtggaatccttccggccttggaatcccccccaaggaaaagcacagtctctgcggaaccctctcaatatctatcgctatccaagtcctgtctccctcggtgccacgccgcctccctctactgtgatggacgccactttaaagagtcagcaaatgtatgctcccagaactgagcgacatccccttcctgttcgcccaccggtggaggtttgtttgaatggcggtccaccaccggactctcagatcaatcgacacgagccggaggccttagagcgaacatcatctattagtccttgtcctagaactttcgacttcgaggacatcctacatctgcaagatctatcaaactctggagatgatgatcattcaatgactttcggtcattctggccagaccttcgatcctcaaccctccgattttgaatcgggcgacctggagcttgctttcactgctggtcagcactctcaatttggggttactggaggccttagccagactggactgcttctaaaagaagcagcaattgatccggcaattctggacgaccatcatttcccagctatggagcagacccaagcaacagaacctttacctgacgtcgcaacctgcccaggcagatcatcagctgaaaactctcgcctttcggataaagatgcctctttccatggcaggcaacataaaccgaagaggatcgtgaaatctggtcggcagccttacaaaaccaacaatctttcagttgttatagaaagtcgcccaaagtctacaaccggtcgaccttctcaagggctcgggcgtaagaacgtttcgttttctatcgttcgtgctcaattctctgccctttcggtcgacgaccgattacagttcctgtcctggctgttcgagggtgccttagctcattgccttactacgccttcgagcacaaatgatgccgctgcatcacgatccatctcgaaccaggatgaaaacatgacacctaagtctaaacacttgggtaaaggggccgaaaaaatcgatgcggaacatactcgttcctcgagaaagggattacgatggtccgtggaagaggatcatctactagtgaaactcaaggaaaaagaaaatctcgcttggtcggaagtgttcaagcgttttggtcaaaagttccccggaagaagtgaagggtctatacaggtatactggagcacgacgctcaggaaacagcgactaccttgagcggaagactaatagcaaatgccatccatcgctttgctgatgaaggccaggaggcgtgcatctcgtacatgtttacctttaacgcaacctcaatgacccctaatattggtcagtggcgaccatctagtggttgcttgaatcagctgatgcttcgtcatgacgcatagcaaatggagagcgagctggagggtcatagttaataggcgcatgtgtttggcgtgcaaactgatgggacactgcacgtcctctcgggttccgcaacgtaactggtattttacggatgaatagatcttggctgaataaactggtcgaaactccacgtcaaagcaacattgcttggaggtggcggctaggcctgttccaagatctgagggagatctccccaaccaggattcagcttgctccttggagacagaactccacctcccaggtgggcatagttgcttttttcaatgatcacaaaaacgtgtttttcattgctcagttgcccatgtcggccgccagtgcgatactggaacacttttacgctgtatattgccagaattgtaagttatttctctttctaatgacaagacaccgaattcaggcagcgacggccctggtacttgatgactagaaatgtttgcatggaagtggttatgactcgccgggagtcgctccatcccatgttcatacgaaaaaggtcaaacgaatggccgtattcctgcgcaaaggtgcctcatcctcaattgttctttggattaacggggacttaaaagcagactgaacatcatctaagatacatatctcttcccttactgtctaacgccctcccatctaaaagcgcgttcggctcgaacaactcacggtctcggctcgacctgggaaatgcggactatcactggttctgctgcaccatatgttaattcatgccatgccacgtcggtacaggtcgaccaaccgagaggtatattttcgcatctttgctggatgcctctgacttgaaatatctcaccaagaatcattctatctggcttggatctttccaacagcttgacctgctttgcctcttgtcctaatgcattcaacgatgagacttcttgaaatatggtggcaatatgctgcaccctcatatctgtcaaggttagaaagtggcgtcaagaaaacgaaaggtctcctgtttcctactgtgagtcattggtcccatgcccaggtggtccaaatcgcctttcttgttctttctggatcgaacccaaattttcctccatttcagcaaaacttgcgacagtatgcttggttcaagtgcacgaaatgctgtcgcaaaataggcttgtacttgaacagtatctttgatgtcgatgggatgaggttgaatcaaagctgagcgctcatcctctatagacaaaatcgcttcaagatttgtgagcacaattttgagttcgtctaaccgaatgtcgccatcgaataagggcgatatttgaagccggcgaagtatatcattaacaaaacccatgtcaaataaccatggatcgaccgattgatggttactgagattggctattcccgaaaagctgtagtaaatgagtgctatgctggctctactcccaaagggcctcctagaaggggtttgccgcctctatagcatgaacccggaacaagacgattgaagtgaaacttcgccaagcttgaagagcatatatccgaggtaggctttcaaatcctccactgaaaacgcacgaaggcatcccgcttctgtgagaaggtttcgtgctttcatctaccaaccctccacttgcatatgattaaagctcccaggcataaagccagcctcctattgcttttctcccctagtgatgacgcgccgaagcttagcttcatcctcgagggttgaagatgcaatgaaaagatagtttagtattaaaatcatctgtataacactataccgaactttgattatgttttggagagcgaagggcgagcaaatggctgaagatgaaggattcatctttaggtagggaaataatgaaagttgattttgggtctttagatgtgattgaaagcatttggtggcgatgagagctttttgtatagcaaactaaccatagggccactgttggattgcttttatgataaagaacatacaaaaagttgagctctactctacgaagagcctatttctctaggctaggtgtgaaacctcagatgtactgtatgaatattcgcagtgttataactaatcaatccgatatatttgcattttattgctttttactccttcatattactcaccggtattgggatccataaaattagcaaagctagagagtggctagcagaaacttgtgtgcaaaaattaccgaattgtcagctatttcatcttgtgtattgctatacatttttggcgcttcttggacgctttttttcagccatgcaatggtatcctaacctcggtgttatctaaagatatttctgtcgatattgaatcatctcttggcttttaatgtctgtatcttctaggctctctatattcctaaatatgagctccaaggattataccacttgttttcataagtttacctgactggggaattttactcttagctggaaagcggtaactcgagagagcactatgaaaattgaatcagataaaacctttttggcctggagaactttgctgcaaactgtccgaaattccttctgttcggccaatgtgtaaatgcctataagccattaaatatcaaaagtcaactaacgtgagaatgaagtaaaacgagaatgagtcttgtggaggcttggtcatttgacttacatttggcaccatctttaaggatggctttttatcaaatatgtaattggactttcggaaaaccactgttccccggttctatgtcaataattctgcctttgacaagtctaatgttcggaggaatatgagggcgcttaatgatttctctatccgagttgtaatctgattgcatagaggtgtttgggaaattgttttctgagggataagaacatacaaaaagttgagctctactctacgaagagcctatttctctaggctaggtgtgaaacctcagatgtactgtatgaatattcgcagtgttataactaatcaatccgatatatttgcattttattgctttttactccttcatattactcaccggtattgggatccataaaattagcaaagctagagagtggctagcagaaacttgtgtgcaaaaattaccgaattgtcagctatttcatcttgtgtattgctatacatttttggcgcttcttggacgctttttttcagccatgcaatggtatcctaacctcggtgttatctaaagatatttctgtcgatattgaatcatctcttggcttttaatgtctgtatcttctaggctctctatattcctaaatatgagctccaaggattataccacttgttttcataagtttacctgactggggaattttactcttagctggaaagcggtaactcgagagagcactatgaaaattgaatcagataaaacctttttggcctggagaactttgctgcaaactgtccgaaattccttctgttcggccaatgtgtaaatgcctataagccattaaatatcaaaagtcaactaacgtgagaatgaagtaaaacgagaatgagtcttgtggaggcttggtcatttgacttacatttggcaccatctttaaggatggctttttatcaaatatgtaattggactttcggaaaaccactgttccccggttctatgtcaataattctgcctttgacaagtctaatgttcggaggaatatgagggcgcttaatgatttctctatccgagttgtaatctgattgcatagaggtgtttgggaaattgttttctgagggatgaagagtgagaagtcaatatcaagggctctgcgcgttaagagaaaactcactaggacgatttccagatccaccgatgtgtagagctctgctagtctctatttccttttggaggcatactggtagaagcctttcggggctagatgcagatttattatgttccagcctatataccgcgtgttcagttcgcttgtacggggtggcagtatttaggatcgttggctctaggccctggtctgtttcttgctcgtgttttggtctctaaagagactctatccaatttggaagaaacaatcggaaggagatagcagaaaggtaagacatgaggctaaattgatatacagctttgaaacctttcgataagtatggtaaaatcatcaataggaacggaaggctttaagcatgggctggtgttcttttaatatatccaggtggtcatataaagactcctttctactgtcggaggaagctatctatcatacattttaattaaataaaaaggatttagtcatggtgagtatccgtgcctttgacccgtggcgatgatatactcacatcataagcctgccccgattcctgtccaattcttgtatggaccggcaaaagtcgctctagaggcaatgatctttttgagaattgattccccggtactcttgaaatggacaccttccgaaaactccagccaagatgctagaatgctgctagacgcctgcaaggctttgaggaacagcaggtctcgggaaacgtatctggatgagaacatttctcttgaggaaggcttgcgcgccttcgaggggaatgttttgcacagtctcagttatagtactgttctaatgctagtactgatgacctggcatttcgatgcttcgtcttctgaagcgtcgtggggcttgattgctttcttgagacaaccttacgataatgaagtgaggagaatactccaaggtcgatactcaagcattatgcgtgagacggccccttcgaacttcgactttttgcttgtcctgaattgagtctatctggtgatcagagaaattgcatagcatgaatgggtttatatgtatttaatcaacggtatccaagctctttcagacggttaccaatgtcttggagatagccatcataccagtcccttaaggtcccttgcatcgcatatcccaaagcttctgcgagctgctgcctttttttatactcctgtaggcattttgaatgtagacgctggtaataaagagctttcttcgagttaaggtcttcgactggttgttgcaaaatgattggatcattgctgctcaagggaatgaattctggaatcctataattcccccaaacccgtgagatacccgtctccagcaccgcaaggtccactaaataggcaccgttcttgttgcgatggccgtcctgggcttggtgctgagctccgaggtcctgaagaccgatagcatcaaaaactacaccttcgaggccctttcttttgatgtcatccgtaagttggagcccattgtgaggaaaccagattcgcactgtcttggttggttagagctcggtattaacgcgaagaaaagtgaaccttacatgcaagcgaatcggtgccgagcctttggcagagagaccagagcaaggattggcgtcttccgcagattcaagcatacttttttgattgggttctgggcctccaaataaaagtgtctcgcgtgagctgcctggggaggagaagaggcgcggcatgcagcgcgaaagcttacagcgagctttatgtagactcaagcagaccatactaactgccatgaaatcccacagtcgaatgagcctgaaaatccccagtcactttgtagtacaaaaaccaaaaatacttgagctcttttcatcagtccttttacttttcttttatttttgtatcccgctagttacagagctaacatgttaaagtctcgctgcagcttattaccggattgtgcgcgccgcaacgcggtcatgcaacagcctacaagcaccaatccttgggtaagacaaggtgggtaaaagcgccatatcgatagtatctctagtgaccttggcatgatctctctagtgtcatacgccattcatgcatcatgggtcgaattcaaatatctggacttgcactcgccggcttcatacacactggccgctatcagtggctagagagcaaatcggccaaggaagaagggatagattgcatgtgggcttatccattgggcagatgctccccgccggggggggggggggggggggggggggggggggggggggnnnnnnnnnnnnnnnnnnnnnnnnnnnnnnnnnnnnnnnnnnnnnnnnnnnnnnnnnnnnnnnnnnnnnnnnnnnnnnnnnnnnnnnnnnnnnnnnnnnnnnnnnnnnnnnnnnnnnnnnnnnnnnnnnnnnnnnnnnnnnnnnnnnnnnnnnnnnnnnnnnnnnnnnnnnnnnnnnnnnnnnnnnnnnnnnnnnnnnnnnnnnnnnnnnnnnnnnnnnnnnnnnnnnnnnnnnnnnnnnnnnnnnnnnnnnnnnnnnnnnnnnnnnnnnnnnnnnnnnnnnnnnnnnnnnnnnnnnnnnnnnnnnnnnnnnnnnnnnnnnnnnnnnnnnnnnnnnnnnnnnnnnnnnnnnnnnnnnnnnnnnnnnnnnnnnnnnnnnnnnnnnnnnnnnnnnnnnnnnnnnnnnnnnnnnnnnnnnnnnnnnnnnnnnnnnnnnnnnnnnnnnnnnnnnnnnnnnnnnnnnnnnnnnnnnnnnnnnnnnnnnnnnnnnnnnnnnnnnnnnnnnnnnnnnnnnnnnnnnnnnnnnnnnnnnnnnnnnnnnnnnnnnnnnnnnnnnnnnnnnnnnnnnnnnnnnnnnnnnnnnnnnnnnnnnnnnnnnnnnnnnnnnnnnnnnnnnnnnnnnnnnnnnnnnnnnnnnnnnnnccgccaggggcccaatcatccttgttggtggctctggtattaatttctttctcagctctctcctcaaagttgaaccatctcttctaaattatactgtcttaatccatgaaccaacccccttatccatgagatggaatccagcaacgatttccactacgtcgccgatttgaagaggcacatttgtcaccttgaggagatactgagagagtggaaacgttatgtcccacaggatgtcatcttgcgatctcaaataccactcgaaaccacaccatctcatcttcttcaacctcaaatctctcaaactctttcagcgacccagtgtagaaggcatccgttgtcaggtacatctgggtcagaagaaacatggaaaaagcctttacgaactttcatcaacagaattccttctgtagaaaaatggcctggcacagtattacccccttaagtttccgttttgaacttgttattttaaagcgaaactctcttaagagacagtgattcgccgacatcgactatctaatatcgacattcagatatcatccaaaccatcggggcttttgcttccctcgcacaaaaatgtgccaacgatgtgaagtgggcgaaatacattgtatcatatcagaaattactgttaggtgcgctttgtcatattgcatgttgcctcggcgtggacccaaaatcggtggacaaaacgatgaacttgatttcgaaaggaggtcccgaccatctccaagaacttcggcatggagcagcttggggggtcaaggcaattgaccgccttcagacagagagcaattgggatattagaagtggtgacatcttattttactgtcagggttctttgtcgataattttcatatggagctgaccagtgagtctagttaccccgacctttacttctttgaggtactgggcgaaagcaagtcaatcgatttcaatatttaccacctgtttgaaagaagatcaatatacaacacaccaagagagtttgcacacaaaccatctctctgttccgtgcataatcaagtgcatattcggcagaagtgtccagtacgtatatttaacgtttctcgtggcgctatctgctaacaatcagcccctagactctcggacgtgtgcaatgctttacactgcaattttgatcttgctcgaaaatcatttgcaaattggtacttagggtcatttgggtcagatgccatggatgagttggaaaagcagaggatcttctttcccaaggcatacttctccttgaacagggagacggaatttggtgaaagccagactgaaagggactcgcaacccgcgagagactccttgcgcgagtcgcagaaaagacgtcgtattggcagcgggccaaattcaaatcttgacagcttgtctctcactccaactttgtcagccaatgtgcaagtgcaggcagcatttcacgaagaccccaatcgttcccttccaagtccaccaggtgagccatctagaaacgagatcccataacgtgatgctgactcccacagaccactatagatatacctcgagcagaaatgcaagctctctgggggtctcacagcaagaaacacgagatcaacggcttctacttgctaatctggatcaacaatgtgcaatcgacgggcgtcagacggcatattcgcttccccaaatcgcggaagatgaatcacgtaagttcttcattgagtggccaataaaataacgactgaaataacatacagatccatgccatctgaatttgacgggtcctccggattttgcagatgtagaagccctctcatattcccttccctccttcaatgccatatcggagattccatttttaccgctttccgagttttcagctccccaagaaacggtggtgtttccctctccttcacttgactactccataccatccttctcccagatgacaggtatcccctcccctaaataaccacgccatctaatcgaaatgactgtcaaatagtctctttgctccatgtcaccacgcagacacaagagttcaaaatctctatcaatccactccattctattgagtcatcgtttgctagcgggatatttgcatcatgattgacaagagaaacgatcgcattgtcttcgtgtaggaggattgctgttatagtaccatagggttcccgtggagatgctccgttcgtaaagtgtatcaaactggttttcatattctggcccaaggtcagctgcatgcgacatgaatgaaattaatagcgcgaaatccgcacctgcttttgaaagggctgaagaagatctgccggaacgtttcgacataatctcatatgaggcgcatcgtccttcgctgaaaattcggccttcggtagccagttcctcagtttgtcgcaaggatcctgctcctgttttttcgcagccgatcggaggtaagccatgggtccattcactgaatcgtcacttgcgccgctattgagtgcacatatggtgtattgcttgactgggttattttggtcgagataatcggcacgacccttgcgccgtgaggcggggttgggcataacggaatggagcacgtgaaaaattatttagccccaccatggagctcttccagttcgacagttgggaatccaattataatttacaaaatttgctctatggataatcttccctcattcccacgcatgctttcaacaaggcaattgacggggactttcctttgcatattcaagaatctgccataaacacccgtaaatcctgctatactcagcactactaggaaattgacgaaggctgataccgattggcttttgctaggtcgaatatcatctataattaacgtaatttttgccaaggatccgcagtaactattgaaaaggtcgtagagcagtataggctaggaccgaattaacgtggatgtgatttgctttgcgtgtgattcgtgtgatatgccctgccgtatgcagatgacgtgggctgtattgcccttctgattttgacagccgtcgtgtgatataagcgtgtagacgctcggtgatagactgatcagaatatctcggtcgttattcgcgtcagccaattcttgctcagtgagcgcaatttatgcgactacctcggcacatttcctgtttacaatgattgtaatagtttatgcgtgggggctcccgagccctcacgggagggtccgcaattggtccgactccgtaactattaacacctgttaacaattacccctccttttcgttactccagcgttcatctcatgtttttagcaagggccatcagttcgatttttatcttattttaggccgattcacgttcgttcgtgacctcacagaaaatgaaatataatggcgcagatggccttgaattcgaggcaggcaataccaaaatcgacccagctgtattgcacggtaagctacaagccccagcgacctcacaagatctttttcacattgactgccctaccagaactgcccgaaggatgcagggtgtcatccaccgagaaccatggcgtaagcttctgggcgcagacgggtcgtatcgatgtcttgctccgcaatggtacaccgcaatccttcttcatcaaggtcatttcgaaaggactaggcatggatatgaccaggggcgaatttcagtcaatgagcgcgatccataaatttcttccagaatttgtcccaaggcccatcgcttgcggcacctacagcacgataccagacacccacttcttcctctgcgagtttcgagaaatgactgacgatatgccggatccccacaaatttgccgcccttctttcaaagctgcatcagcaaagcgtatcgcctactggcaagttcgggttccatataaccacctacgcaggaaacctaccccagttcgtagcatgggaagagagctgggaggtttttttcgccaagaccatgagacaggcgcttgacctggagattgaaaggaaagggcctagtgaggagctcgatgtcctctccagtgctttgttcgaaatggttatcccaaggctccttaggcccctcgagagtgacggccgaacagtgaagccttcacttgttcatggagacctctggtacgcgaatgcagggattgatgtcgaccaagatcagcctctcgtcttcgatgcatgcagcttctttgcgcacaacgaatgtacgttctcctacgaaaaactcgcggttgctcgcactaaaatttttaattttggagatgaatttggtcagtggcgaccagcttgcaataggtttggagacgagtacgttgctgcctacaatacattcgcccaaatttcgccaccggaagaggatttccaaggccgtttagacctctataggctgtgagacacccagaagctctttccctccttcctggtttgtgtagctgatatcaagctaggaggtttgacacacatgtttcagcgctttttgtcgataacgagacacttcgcacacagtgagtctattccatgcctgcagtctagttttgcggctaatgaacttaacagggtccttgatgtgatgagagatttggtacagagatatggttagtggacaggagcaatattagtatgtactttttctaccgtgtagttctaggaaagtgcgtgctcggaggaagtctcggccacaagcataaaaagccgcaaaagaataactgaaatcgatgagattgaactatctagagctaataaagctgatcaagaagctagagtgaatgtgggaacggggatctcgtcccgtcccacaggattatggctgggcagtttccctatcacattcccgtaagtggtgatctgtatggcatctacgttttggtttgggggttagatatatcccttcacattagtctcttactttatagatactcttttagtcaagtccgccccttatcaccgccaggtcgccaccccgagttaacataatatctctctttgccaaggcacaaacaatgtccttccttccagcaaaccaatcgtatgggacgaaaaagtgctcaaagacctcgatggttgggggatctttgcgttgcgcgatctctagctcgctgatcccaacagagcagatccaaaacgaccggctcaagaatatgagtttcttcgattcgtcaattccgatgacatgtgcaacgcttagttcgaatgcagtcatccatgaacgatgcggagcgaccggactcgatgtcgtgagcaagttttcatcgtcttcatctgtggcgcattgatctaactgcttccctagcaaaaagctgctgtcgttgttttcgatggaaaggcagtctgcgtcaattatcgcaatcatgttgatgctcgcggagctattcggatataacaagtcaagtatgattctttgtttttggccaagtgaatagaagctcgcgcttttgatctctgccgtgtcgttgtccaacgacagtgcaatagatgaaacttcagaccagtcgctccagcagtaagcgctgattttgacattgtcgacacagaccatatgtagggaagattctggatgagagagccatttgcgaattcctggcactagcggatatgtccgctctctctcaaacttaccgctgtccaagttgaacagataatcagaccctcgagtggataccaggaacttcgccgctagttctcctactagcacatctatgattgccttctcggagtcgaggtgggacttgaacagtaccgtcgaatcgctgagccaacctttatctgctgacttacgaattctgtgtgcgaagatcctgttggaggcatcgatgctaaggagggcatctctccgttcaatccagaccaacaggcggactggtgatttatggctgtagagaatccccaagctcgctaccattttccgttcgtacagtacgactgatccatcatcctttccgcaaaagatgacttcgggcgtgtgatgaaccgccatggcagtgatcttcgctttggcttccatggaaaccgtctctaccactgtagtgaaagtggccccactgctgtcatcacttatggaccctcgcaacaaagcttcaggttcccagacagtgcactgggcgcctcgtatgtcggcaagaaacatactgtctctggtaaaggcaagctctttgatataagagttggatgacttgacctagtagagaagcttaaatgtatcaaattcgtaaacgtggataattccatttgcaccacccgctgcgaggagacgcccatccggacttggggcgagggtttggcagttggcacgaaaacattccagctgcttatctgcaaagggatcaagaagggctagatcaccatccaggtatgcgaccgcgagaaggctgatatcaggattggggttgaaagcaagtgcgacgacgacatgcgtgctggtatctccgttggaaagtttcttgccacagctaccagcgtaggcgtcctcttccatgtcccacagcacaattagccggccgctgtaagcgacagcaagcattccttggttggtagaaagagtcagtgcgcatagggccccgcgcggaggcgttcggttcggcgtatcagtttcgtaccatggcctccgcaccgactccggccgggagctacgtcctaaatcccaagttgcgacgtagttgttgctactcgcaatcaaaagcatatctgcatcgaattccatccccatcggacgtagagggctcgcgaggctgtgaaccacttgcccacttctgaagtcccagaccttgaccaacttcataccacaagttgccaagaggtcagtcttggccttaaaagcaacgaacttaattgcttctccgtgctccaaaaccttgtactcttggtaggttatggcgtagtatagtacgacatctcccgagctgagaccaagggcaaggaaatcgtccccatagcacaaggcccttggttggccttgacggaagtcgatacacagcagcctgtcatcccattgcttattaggcgcgccaagcactgcgagcctccggcctaggctcctagtgttgtaaaccatagaatcgatcggacagaatggaggtatcaacgagtatattgctaatagtgatactgcaagggcgttggcgaacatggcaggaatccgagcgagatccgtggtccactgtcgtagcgcttttatccgagggtccagtggtaagcgctcaacggcgcacgcattgacgtacattttgagatgctttaaggcgcggatgaggtgattgagatttcgagactcggcaatcgcctcgatccaagtgaggacgttggaacccaagaactacatgacaagctggaacgtcactgcgaccaatggatcagccctcgagaggtgatatgagtatgctgtatatgcataggcggcaaattctactcttgctgctggcaaatttgccgaaagtcggcgtcggctgttcctccgaggcttcatttcctccccaattaggtaattgagacatacctgagccatacgtgtgtgcgctttagtcctatcgatggagaactcggactcaagtccgccgtctacaagaaattctctggcagtttcatgcaccatcttaaccctcccatatttgtccacgaccaccagttaaccgcagagcgctacgatgctctcctccaatcttaggaatgaatcgtggatatccagagacagagcaccgcccagttcgctgattgtcattggtcgaatcgcgcatgctgcccaaatgagaatggttttggccagctcctttccgcgaacggcctgtgacatatagtctaaagtgcgcttatatagagactccatgcctctcgggacattttcaagaatccgatagatttcctttctgctgtggcagcgcaggagttcctcaagcaccaatactgtccataagaaagaacccttagatttgtcaaggatcttctcggctaaagtatctcgttcgtcaggtccaacgattcctaagtcctaggtcctcctctcaaccaaaagcctgaggtcaaactctgtgtcttttatcgagattggtaaggactggactaggttagatagaatgacagagaaaccttgatccagatcgactgtattccggcttgtgacgaggattctcaagggcatagatttgtccatgttggaaagaatggcatgtaaaagaatatgaggattagagcattcgtccaaggcatcgatgacccagtaataacgagtcgttgtggtctagaatatgccagaaaggaacaaaattctccaaagagtacgttcctcgacgcgatctaagcaaacaccatccgcttgcatccctaggatggcatcacttgcttcggcatcggagctacccatctgaaaagccagggaccggagacaacgacctaggttagacttcgacttatctccatgcttgaagaaaaagtagctgcatgcctggccggactctttgagctagtcgatgacatagccagcgagaacagatttcccggttgcgggcttgcccttgatccatagcgtcctgtcatttccggattccccctctctccatttgacgtaactggctttcgtcgatatccatctgcacgacccgtgcagccgagcttcgcaaacgtttgcaaaatcatcgtctagcatattgaaaatttcaagatagttcttgagacttttgatcctctcgcgtctctgcttcagcttcagctctgcgatcgccgtggcaatcttgctaacagtagaggcgagcgcatttcgtagtagggcataattggagtcttcaggcgtgtcaaacttgcatatcgagcggtggtcagcagccataggtatctgcttctcttcacggtacccgagaacggccgattcgggatcgacgatgagtgagctgaacagtttcatattctgcgtttcgtagaatgaccagagctcaaggccggccgaaaaatgccgaaattcgtcattgatcacttggatcgccccagagttcggttccagatcgccaacataagcgcggtcgtacgcaatcttaaggaggtaccttagcgtctttgccgagtcggcacctcgatgcggcgtggcaaggaaatataatgcggtaaatcgttcagacagtgccttgtgcactttgtcttgtttcgccaggatatatgcttttttcatcaccaagccacccatgctgtggccgatgacaatgatgtatgtcgcagaattcataatgcatggcgaagtgctgatcgcgcttaggaatgtcttgccaatgtggtgtacattcaagcagtcctccctacccttcaaatagtatgagtcgtatccatagctatggatgcgggcgttctggaatgcaggatctttggagagccactcctttggccaaaaatgagattgcagggatgacttgctccatgtctttctagaacttccccctaggccatggacgaagatgacatcaatctccggtaccgtgggagaatacaagaggtttagtccaagcgggcccttcacgtcctccgcctgatcaaccaagatggctgacgtccgggacaggggctttgacagagaaaacaagctcctcgagctcttaattgaatcgcgactactcgaggaattatcggaatgtggatcgggctttgcgcggtgctgctttcgaaagaactggtacagtcagcgatcaagcagaattgaattttccagtaggctaaggagtcgagagtttaccattgtagcccacaaatttcagtgtgtggggcgccaatctcggttgcccgaaatcatctaaaatgacttcagcacgacagtctgtcaatcagaagaacaatggaacaatggaacaatggtacaatgaagtcgtttcaggaaagactgttgatgtccagtgcctcgggatcgaagcaggtagcaattaggcggccaattctccctcccgcttcaaatccttcaaaccaccaatcagctggttgctttaagcgctcctctatgaaccccgcaggctcggtaaaggccagcatgcatctcttctagaaaatcgcgcactccggaattctgtaaaacccccattgacatgcacctttcttgccattccttgatgatgctgtgttgatttggcccataagagagattctccgcgcattgtgttttagtcgaaagagcgatttagcatgggttcccaggcgaatccggccttcacagttggggaccatgaggctttcatggaattcgctctccttcaggctcaaaaatcaccgccggctgccaacaaattctgcgtcggagccatacttgtcgatgccgctaatggcaaggtcctatcgacggggttctcgcttgaatacccacgagactacaagggagacccaggcaccacgcacgcagagcagtgttgttttatcaagattgccgatgagcacaacctcccagaggaacgcatccatgaagtccttccggccaatacggcgttgtacacaacgatggagccatgcaacgagagactgagtggcaacatgacctgcgcgaccaggatcttgagactcaagagcgccataaagaatgtctacgtgggaatcaaagagccaggaacttttatcgcgcacaatgacggacaggagaggctggaggcaaacggcgttagggtcatgttccctgttgaacattggcgtgacaggatcaccagtgtctcaatgatggggcactgaagactgtgatcaggttagctgagataaaagagttgaggttgcggaaacacccggacggcccgtccgcccacacagctctagtttaatctggccctcttattgttacctagggacgaaattggcgtgaatatacatatttgttgctgcgaggctctgggctctttcttccctgcgattacccctccctgtgtagctcattcctcggacataaacgcccccgagtgtgctcatacatgaaaatacagcatgaaaatatgaccgaattagcgttataccctgatctaattgttgtttaagaccaaagtgtattattttcattgtcaagctggaagcgattgggaaagaattcggaagatcccagatatccttgctctaaattaagtgcgttggcgaattgctgcgtgcataggccaaaagacaaaattatcagcgctgttattcttatctaagattcttcaacatgactaactatcctagaagtgatctgtgctcggtaatcgtgtgagctggggcgataagaggcatcccactctgaactgacaaataagtttacctaatccaaagtgataaatatgtgtcaacaaaagaaggttaccacaattttactagtgcgcccgaggaatattcagcacccccctctgcctgatgatcctaaggctcccaacgaccttactaagctcatcccctagttatttattctgcactttctatagtatataaaaatcacactctcaagtactcaattggctatgcccgtactagtccgtactgtaacgaccacgttccggcagtatgcaacctcaagtatcctgcctcgcttgcgccgcgtagcatccccggggtctaccatggattcctcataccgttgctaaattgcaagaatcttctgaactatgtacatggttgatgatggcgcccatccttcttccgcgtgcagctatacaagagatatacatgacccagaaacacccaaaggcttcatctgaatggaaggggctcaacgagagtgatcaaaccaaagaaattcactgctgcactgaattaccaacaatgtccaaataatgtgcacatatattcacagcttgatggaatgaacataagcagcaacctcactgccgaaaatccggtctctcacaagctggtcggccgactcgacgatccaagtctggcagttcctctgagtgagcctgctccaccccctagtggaaccgctccccctcagagaacctgccccgcatcgtggaagtcatgacggtacaccgaattgaggctgctatgctggtactggtacagtaggtcccaaaaacttgtacgaccattaccctcttcgattggttccccaatcctaatgccaagcctcattgatctatatcccgaatagggacggaaaattgatattccggtatctgcgtcatcacctgctctacacaagtcggatagcacattcaactctcctgcctgcctcgcagtggtcgggagcaaacagccgggacattctcatttgtcagatacttttaccgtggtcactcgactttacaacttctttgctatcgctttgaattctggactttattgacggcgaccaccgttaaatgcatcccgcaaatgatatcacaacgacggtcgatgacggctctcattcacgggagagcattcctccatggggctcattgcccattgaacaatatctgattgtaggatacacgagacacagcctgtttattcgcgacttgtcattcgctaacaactcaacagagaaactggaatcattctgcgaccgacacacccaaccagcagcggcggcaactaattcaccagttcctcaatttcgatgagattcccgaagaatatgtttctttgaatgggttccccccgctaaagccaacgtcggaggagattgatattattcttcaaccctggcgatccgatagcgaccttcgtcggaaagcatactatatgtccaaagataacgtgcttgtttttcttcggacccactataacccagacgacaatgacagaatgaacgaatggggctgtggaaacgatctgttcgaggataacgcctggtgggcgtgtctcaatgatccgtatttattcaatttcggctcagattggcagcaggtgtacgaaatcatgcctgagttcgctggtcccgttgatcgcaggagacaatctgctgatccaaccaatttagaaggctcttcagcaacgtccgaaagaagtctgcacacaaagaagccgggaggtttccatgagtggacagagcatcaggtaaagaagactgaggagtcagccaatcctctacagaacgtcaccatagcggcatacattgttattgcggatcaggagtcttttcagactggactgttgcagttattttgtttggacgataatcgaaaaattgtctgggaggctcgggttgatcgaaagccagctgagatcatgagacgtattcgccactcgggtcctgcactagaactataattttctgaatacaaaaaaaacaggattgtgaagcacatggccacaagtagatatggtgcagtagagacctaatagataaataatcttgaggtctcgccatatcaagagagatagactaccaacgcaatctgtcagtacacatccataggtagcaatcatcactatgccagcgtcgcgtaacaatgatcgtgtaagctaaaatcaggtacattctgtgctcttgacagcttgtcatgcggcttctttagcctcggctgcaatgggaggatgaccagggcctttgaatagcacaccgatgatggaaatgtcatcagaaaccctatcgctgatctcatgaattttgcttgggtcaagagatgatatctgggaaagggtataggtctgcatggcgtgagtatatgcacttatggcactctgggccagagggttgccagggctagggtcgaaaatcgattcgggcatgacgggctagaacgattgtttcgttgcgtaatttcgttcactggggcacgtcttaagttgtcgtaacacaatcttgcttgggaatcagcccgatcaactgaccagcgatctagcgtgtataggcaagagaaaaaggcgtacaaaaatatgctgcggcgaaatcgttgtagaaggaagtagaacgcaactgccattgatgaaaatataaattgttggatgacaattcaccgaaggaagaggatgtcgtgctaacaggaaaagcagaggaaccagatggggtgcgaacccagattcacggtgaatcagacacccattacgcacgcaagtggctttgcttgcggacccgagggaaccaattgggaggatgtcgacggacagggagaacgggaagtggggtagtaatgtctttagtcgcgatgcggccggagaaagtagccgtccactggactcggtggattgcaccgcagctcatgtcagggcaaaggataaatttggatcatgcttcttggtttattccccccaatagttaacatcctgtgcatactcttcattggcttaccgaccggtctgcgaccacgcgtcagggatgcaacaaagatccccagccactattttcggtattttcaaataggatccacaaaagtgcacaatcacaattctacgtcttatcccacatgagatgctttgtttatgggccaagatttgcgagtctcttggagaaagtaccccactgaatgttcgacttctatgctcgggttgtgttactggatgatttgttccaacagctgcctctttgctgctattgcagtgctttaggggagacgtttctcattatgctgtctgtacagatagcgtcccgaggtacaagggtttcgttatactgagtttacatcaaaaagcgcaaggttttctattttgatttataatactcctgatctgatccagccttaccatctaactgcatttcgtatgggtggctctgatcgcatggaggagggttctctatggcccttgtgcacattgacggctggtgggtcgactgggattgtgcttgtggcttagacttgttcatgttgctgctatggtttgagagaggcccgtgtagaaggtacgatggctgggcatgagggctgttcatttggctaccatcattatagcccattcgccgcttgcttttaggatagtactgttgctgggaagcatgtcggagcctttgggaagcagattggagattttccctctgcttctgcttctgctcctcgtgttcagtggcggccctaatggaggatatatgagtatgagagtgacaagcatgggtggaagacttaaagaacggacttggatgtagctttaatgaggctatagccaccacctaaagcaaggccagtcttgatgacacccacattttcaaaggggaaggagtttcggtagaagcttaggggattattgaaaatgtggaaatttgaagaccggaaaccgagggctattcattattgtctagcactagaagctgtgtcgttcgagaaccagagttaggcccctacacggttcggatttattggcaggctttctgggaagatgagaggggtaggtaaatggggcgcggggtgcgaagcagtggtctagcgtgcattccaggtgccattgtgactaaacatgcgttcccctgatgaaacgccaacagatggaataacaggaaatcaggagaagcgaggactatcatatattcatagtaaaatgtcataacttaactgtaccgtgctcaagagcgggatggaatctgtccaagtgggtgccctccctggaagcggtgagggtgcagcaaaggttcgaagatcacggataccgtctgtcttcctcgtttgccggtccgacgttcttgaaaccccagagaccttacgagtctaatacagaagctattttgaagctgtcatttacgcttgtactggaatactgccaagaaaggggttcaggggtagaataaccgtaacgggtatagcgtatttcgccacaactgcctctttgtggctgctgcaatgcattaggggagctatttctcaatatgctgtctgttcagtgtccggggtataagggtttcattgtatatactgcattttacaccaaaaggcgcttggttctattacgggggccacttaggtatattttgacatcataggctaagctgaaatgtagcgcttgccattatttatctaagacactatcacgatattaccaactgcatcacacctgtctacgtccaatcaataccagggccgcatcaagtgcaaggcaaggctcaacgacgtgcggatgtaaaaatatccaataggaaagaaatacatccattaataaattaacaggaacagtgagagcttcaaagttggcgaggacgttcagaaccgcttgaccggactaagaggaattccgatgccatgcttgccacggcatttgtgctccaaggcttccagcaagcggtatatttcttgttccagctgacggccttggcctcgcggatccatagttgcacttctttcttagttagctgctcggtgaattcaccgccggtcaacagcctgtccactgattgttcgaatttgctgcaacaagcgagaatattctggcagttccaaagaacatacaaaataaaagcgtccaaaggaaaagttttgttttgtctgcagaataattagcggaagatgagcagtcagggaacttggagaagctccacattttctttcccgtttcctcactacacaaaagaaaaaaaccacgtcccagatggcaaccggaccaccaccagcgctcaccaactagcttgtgctcgtgaaaagacttccgagtcctctccgctattgctttagaaagggacgctgtgccacagatgatgtctgtggctttgaccttcgcagtctggccagggtgaccggcttctttttgtctgtgaagctcttcgacatacgccaaataaagcataatatccgcgagccgagatttgagataatgtgtctcttcgcccgcttgcatagcatctacgtatctccaaatcgcaaagcctttcgtgctggaggatacgaggggatacttcgccacgtcaagctgtggagaatgccaaaatccggtcaacttccatgatttggtgtgcttttccataaaataaggcatgtcaggtcgcaagatacgatcgcactttctttcaacttcgtccttcttttctggcgatagagtggataggagaggatcgcataagaagcggccattccatttatctttacctggcttggaaggtaccgttgtcttagtagggccaacacttgaatccacacgacctttgaccactgaacgtgctaagattctccccgacgaggaattttcgccgacattctctgcaatttcgtcgtaatgcggggcttgaatcccactctttcccttttcgagacgaggtctgaggtttctggagttgggagctgaatgtgattcaagtccgggaaaaagcttccgtttggtttgcaaaatttggcggttttcacattccgaagtcacttgacgactatcagtgtgttgctcctcattgggcagattatgccggtcacttctattgaaggtaggggagatagacaccggagtgaaggttattggatttgactcggtattcacggaattgttgtcaccaggtggagaattttcgatactgcaagaggtgtcctgcaaaaatctgggcatctcgtccaagacggactcaatttccgagtctccaaagtcttcgtcattggtggatgcagtctgggggtgatcattttcggtatcatcagaggcatcttcgaccgttggctgcaatttcgagaaggtgggtgtactctgatgtttgtcgacagctcgattctctgagtcaatgccgcttgttgtccttcctgccgatctctccacatatttactccttgaaactggcgtatctggagggtttgaagtgggcgtgggaaaagacagacctgcgcctgacctcagagatggtgaagatgttcccagggctgggcgattttcacccgaatggttgcctgtaacattttgttgtgcttcttcaacagccgatatctccatctcattaaaacccccttcttgcatgatgccagctgaaacattatgcggtgaagtttctggtgacctctcacctatccatacaaggcggccgctgacaggagttggagacgttgggaggctagccacgggactatcttcatcgatatccatgcccggggtccattggtcttcggaccctcccgtcaaacgtgatatgaatgatgcgctttctttcgtaggatcgcaggacctaggagtggagctgggtgaaggttcgggtgcgtttgaattgtcacattctcggagtgcccagtcaaattcattagagggacaaccatcgtgtggggtaacgggagacggtttggcatgtgggttgtgggctatttctgttttcgaagttagcctttgttcaaatgtctaaagcccaatctctgtagaattttggatattaccgtgtgggggtgaggctggttgactcaacatagcttccgcgttcgaaagtgtcggggttccaaaacggctaggatcaggcgttgaaacaaaggctgtcatgttgtggtctcgtacgttcatgtccatcgtagttaacgaagggtctagaaagagagcacagtaaacaacggcaattctcgtgcgtcagaaacatgaaagccttaccgatgcagactggctcaggcgatcgagcatgcgcgacattaccaaaggccgaagtacatgttgcaggcgactgcacttggcaataatccacgatatcatagtcgatgagacaatctgtgctcattcgggctcgctcgtagaggacggcgatctcatcgcgagaaagcgaagattggattttgcaacagtggcagagggagcgtaaaatctgcattgagattagatatcttgcgaccggtgggatatggaaatgacaaacctcatctgctgacagggacggtaggttatttagactgttctgttctgcatcaccagtattctgtaggcaacgtcagatatttagaaaacaacgtaaggaagaaacccacattcaaagtaaacctgatttggagcatttccgacgcaagtgccctctggtggggaaataaaggaaagttgtagtgatatggctgggccactggaagggtgcgtaggaaagggtatcgtagagagttggtcgggcgaagaagacctgatggagggaaatcgccctgctcactctctgctcaccctctgctcaccctctactcaccctccctgatcatgaggggtgttgaatttcgcaaacttcggcatctcgatgaacataacctgaaaagagggttggaatacgcgacaaacactgtgtcactcttaaaccgaatttaaaccgcaaattgtttggtcgtgttaggggcaacaagtgaggtagagagtggaaattcaacaacgtggttaacatggtaggcattatcagctggtctgatttagtcaatgctcagtgaatatcatgtgaacggaggatggaccaatgaagggccctaaaaaggcttacgtagactgagcactccgggcgtgggtggaaaatcctttttcctttgtactcacaatagggggcggaggatatggaaggctctggtaccacgtgaccgtgtcgaattttcgatacgatcacgtgaagtttctcccgttataggccggcacaatcctgagggggatgttgaccttgccgaattatttcatgctgttgtttgattgtttccatcaaaatggtggaacaggacagcagagccctatattcgcattcgattttctaatctctcctatagaagttgtaggtatctccctacaacgataacaagaatgtagatgtattaaatcattttacatccgcccgcaattcttcctcttccaccctttcccagccaggaataatgtcttctaaggtctctctgattggccgtggataataatggtgctgtaattcaataagccaagtaacttccagcgcgacaaaatcactcatacatacctcgtccttttctgccgggagccacttcttcttacttgactcgaagatgtatagttggccactttgccgatttcggacggctacaacaacgtctgactcacagtagatactgtactcggctgcctttttgaaaaggccttttctgcgcctgcgtaacttctgtgctctcgcacgaaggttctcatgtttggcggtgattttagaaattagttcggaacttggagccattggcatatatgagaatatttcggattcttttcagcagcttatccgcattcgtggttaatatatctttgctcacggtctcagtgagggtccgccggatcctacaaggaagcagcatttgctgtgctgcgcggcccatccacagcgaccaagtatcgagcccttcaatggtgtattttgagtatacttattctcagcgagccattttaaggtcggttcgtaactgatacgtccgccataagaaggatataacagctcgggtttcgcttttattttgattcgcaacatggatatcttgactatctatgcgatcgccgttggcggcatcttcacaagtcttattatcattagagtcttgaatgtctttgcgccctggggcaacgcgatgaatgttttcatttaccagcatcttgcatatccgtatgttcttcgccgccattcacgtctggggccttggacacgagccggtgtttctcttcatttgatctacctcgcagtcaatttgctgctcctgtttttcaaccatatatccatggcagccactggtcgtcgagcaggaacgctgtcgctgctcaatatgatattccttctggcttcatggcatctgagcaacttggctgatattttcgggatttctctgagaatttaccgacggatgcatcgtgctgcaggttggatggtggtagctttggtattgtttcacgtttttgccatgctacagggcaaaattcaagaggatcaggggatgaacactgggcgcctttctgcaataattgtttgtaaaatgaatcagtcattacctggatctgatctaacaacatattgatatttagggcgctgggtctctatgctcgcttgtcattttatccctgcctttctgtcgaaagttttcatacgagttgtttcttcgactccatcaggcactcgttgttgcaagtgtttatgggatttggcggcatcttcccggtgaaacgtattccccccggttctatctctatgttgcattgggaatattgggctgtacgtccctctcccacttgatactccttctttataggaatggtctcttttctggcaacggatgcccgagagctattgcgatctgccatacgaatgaacgcgacgcagaaaatgcaggccaacacgtgaggacaacgccaattcgagtccgcctcattctgccaaggccagtcaaagcaatggccgggcaatacatcaacctgtggctgccttcgctgagtttatggtcctgggcacagacgcacccatttatgatcacgtcatggtctcgggcagaccagggtgtgttggatctcttggtagagccccgtggagggctcaccaaagctcttgtccgccaggcgcacgcagcagcaaaggacaacttctcttctttggccctttatagcggcccccacgggatcagcgagtctgtggataaatacgagagcgtcctgttggtagcaagtggggcaggtattgccgctatcattccttatgcaaagaaattgatccacggttataacacgtgcacatcgcatgtccgcagggtgcacttgatatggcaggtagaatcgcttggttggtttttttgctcttgatgaacaaaaggggataggctgactagatagatgttgctatatccatgcaaggcctcctgaacggtttgttaaaagacgatgtgctagatgatggctacgttcgtttgaaggtgttgtttcatgaccattagctgacgaagccttagatacttgccatatctgtctacgttgggcgagggcctctcacacatggaaaactgccctttggcaagcacgaacgagcttttctataccagggcgctccggactattcaatcatcattcctacggaggtttccggtgaaaaaatcgaaagactccccaatatccgagacgagagaggccaaatgctattgatcggtaggattctacgagcacgatagattgccaaacgctgacatggtaatgtttatagcttccacctcgggacatttgcgagatactctgcgacatattgtccaaggatatttacaccaacgcctgcaaatgatagaactcgagtatcagctataactctgaggctctggttgataatattgcggggcaggtgggcctatcatctgagggctcagggtgttgtgtagttccttgcgtgcgttggaattagaacgtcaatagcagatgtggttttgcgagattaggcttaggtgatggggatctacaatagacatgcaatttggacgaatcagggtgtggaggctgcgacactatttggggaagcggcactgtttaggtgccgcacccgcactctgtagtttaggccacgatttgtcgctgagaccacgatttttggcccaggccacgattcggtgtcgcggccacattttggtgctcagttctgctcagtccgatgatgtcatttctttgggcaattcatcttgcccttctatatctcagcgtttctgaacgattctgctcagggaacgtgactgatcattttccacactatttcagccttcttgattcccgttctccgctcgttgtctcgcccattcttggaatcccaaagctctctccctaagtgcttctgcaccgtccattctttattcttattgacgacattatttatttggccctggtttttttccttcatacgaacccgactttcatttttattgttaccgaatactgcctacgctagaccagaggtacgaatttctgagattgtatgctgaaattcaccagacctgaactctcaagtatttagaagtgcaagtcaaggtaaacaagccttttcttctttttcaagaacacctatcacattgccagtgtgagctaataatgaaattgcaagatggccgaatctaccggtctcatggacgatacgattgactggatcaatcataaaacccacacgccaaatcctgtatcagatcagctttccggaccacaatgcgatcatcttgatttcacatccaacctgaacattccgcccattccgcaaggctttgacagctaccccactactgggaatgtcatcaactatgctttcattaccaacagcaagatcagaaacacggtcatgaataaagttgtctgcattagcgttacgatgagagatcctcgaattacaaatactatgatcctcaattgtgtggatacaaaccgcattcccactttcacaacgcttgataacgctgatattgacgccgcttttgtatttaactctatcatcgtcacctctaatatcgacaattgcgacgttgctgaatcaacccttggcaatgctaggctcattaatcccgtcttctgcccgtttctgtttccagagctaccgctttcagtccaggacaattcgaccaacgccggggtccagattgattataatataacacctgatacgacttttaacacacccggcattacatctcaaaaccaagaaataccgaatacttcagctcaaggcatgcaaggggctctccgaaatgacacagacgtggctcctcaattatcattgaacctgctccaagaggctcgggcttccttccagaattccataccggagattggcagccacggggaacacaacagtgaagatcaagtggaaacctcgaccgaaaatgtctcgatcctaccaaatgtatcatcacctatcgggatttatgcgacccccatttctgattgcagcacaccctatgacaaagttgctgcgccatcttataagccaaaaaaacgaacacgaaaacaattagtttcgaaaggaaagagaaagagacgaacagaaccaaagccgcgtgtggggaatacaaataacaacattcttgctcttctcaaaaattgcgtttgtgggagcaaaagcaaagaactcaacaacaaacaagcacgggaggttcagacagttgcggattacatgattgtgaatgattgccacgcattattacagcctcaacttaagaaatggcagaagaatttgtccagtgataagcacgccctcggattcccgcctttggaaaagagtgcgacagctgcggcgaaatacttcgaactactccagtctgagagacttcttaagtatagcctggaacaccgcatggcgctcatttctttttacttgatttatcttgaaatcgcccgtgaaatgagggataatgaagacctcggtgactacgagcctcgatctggagacgacagatttacaacaatggccaacgacaagatcctagcgaccatccacgggattaaagtacagaccatcagcaaggaagaaattgatcgtggtagagcaaggctgaacgagtttcatcgctggggcaaacgatggtggacgcttgcgagtggtgtcggtcttggagtactacttgtacccggtgaacagctcgct
